(19) United States
(12) Patent Application Publication
(10) Pub. No.: US 2015/0132286 A1
(43) Pub. Date: May 14, 2015

(54) PANCREATIC CANCER TARGETS AND USES THEREOF

(71) Applicant: CELERA CORPORATION, Alameda, CA (US)

(72) Inventors: Bruno DOMON, Zurich (CH); Ian MCCAFFREY, Rockville, MD (US); Vaibhav NARAYAN, North Potomac, MD (US); Scott PATTERSON, Newbury, MA (US)

(21) Appl. No.: 14/489,669

(22) Filed: Sep. 18, 2014

Related U.S. Application Data
(62) Division of application No. 13/100,902, filed on May 4, 2011, now Pat. No. 8,865,413.
Application No. 13/100,902 is a division of application No. 12/287,040, filed on Oct. 3, 2008, now abandoned.
Application No. 12/287,040 is a division of application No. 10/912,745, filed on Aug. 6, 2004, now Pat. No. 7,473,531.
(60) Provisional application No. 60/493,369, filed on Aug. 8, 2003.
(60) Provisional application No. 60/512,690, filed on Oct. 21, 2003.
(60) Provisional application No. 60/519,832, filed on Nov. 14, 2003.
(60) Provisional application No. 60/552,390, filed on Mar. 12, 2004.

(51) Int. Cl. C07K 16/42; G01N 33/574; C07K 16/18; C12Q 1/68

(52) U.S. Cl. CPC C07K 16/4266; C12Q 1/6886; G01N 33/57438; C07K 16/18; C07K 2317/24; C07K 2317/622; C12Q 2600/112
USPC 424/131.1; 424/133.1; 424/139.1; 435/6.12; 435/7.23; 435/235.1; 435/346; 435/375; 435/252.33; 514/21.2; 530/350; 530/387.2; 530/387.3; 530/387.9; 530/391.3; 530/391.7; 536/23.5; 536/24.5

(57) ABSTRACT

The present invention provides a method for diagnosing and detecting diseases associated with pancreas. The present invention provides one or more proteins or fragments thereof, peptides or nucleic acid molecules differentially expressed in pancreatic diseases (PCAT) and antibodies binds to PCAT. The present invention provides that PCAT is used as targets for screening agents that modulates the PCAT activities. Further, the present invention provides methods for treating diseases associated with pancreas.

### CROSS-REFERENCE TO RELATED APPLICATIONS

[0001] This application is a divisional of U.S. application Ser. No. 13/100,902, filed on May 4, 2011, which is a divisional of U.S. application Ser. No. 12/287,040, filed Oct. 3, 2008, which is a divisional of U.S. application Ser. No. 10/912,745, filed Aug. 6, 2004 (and issued as U.S. Pat. No. 7,473,531 on Jan. 6, 2009), which claims priority under 35 USC §119(e) to U.S. Provisional Application No. 60/493,369, filed Aug. 8, 2003; U.S. Provisional Application No. 60/512,690, filed Oct. 21, 2003; U.S. Provisional Application No. 60/519,832, filed Nov. 14, 2003; and U.S. Provisional Application No. 60/552,390, filed Mar. 12, 2004, the contents of each of which are hereby incorporated by reference into this application.

### FIELD OF THE INVENTION

[0002] This invention relates to the fields of molecular biology and oncology. Specifically, the invention provides a molecular marker and a therapeutic agent for use in the diagnosis and treatment of cancers.

### BACKGROUND OF THE INVENTION

[0003] Cancer currently constitutes the second most common cause of death in the United States. Carcinomas of the pancreas are the eighth most prevalent form of cancer and fourth among the most common causes of cancer deaths in this country.

[0004] The prognosis for pancreatic carcinoma is, at present, very poor, it displays the lowest five-year survival rate among all cancers. Such prognosis results primarily from delayed diagnosis, due in part to the fact that the early symptoms are shared with other more common abdominal ailments. Despite the advances in diagnostic imaging methods like ultrasonography (US), endoscopic ultrasonography (EUS), dualphase spiral computer tomography (CT), magnetic resonance imaging (MRT), endoscopic retrograde cholangiopancreatography (ERCP) and transcutaneous or EUS-guided fine-needle aspiration (FNA), distinguishing pancreatic carcinoma from benign pancreatic diseases, especially chronic pancreatitis, is difficult because of the similarities in radiological and imaging features and the lack of specific clinical symptoms for pancreatic carcinoma.

[0005] Substantial efforts have been directed to developing tools useful for early diagnosis of pancreatic carcinomas. Nonetheless, a definitive diagnosis is often dependent on exploratory surgery which is inevitably performed after the disease has advanced past the point when early treatment may be effected.

[0006] One promising method for early diagnosis of various forms of cancer is the identification of specific biochemical moieties, termed targets, expressed differentially in the cancerous cells. The targets are either cell surface proteins or cytosolic proteins. Antibodies which will specifically recognize and bind to the targets in the cancerous cells potentially provide powerful tools for the diagnosis and treatment of the particular malignancy.

### SUMMARY OF THE INVENTION

[0007] The present invention is based on the identification of certain cell surface proteins or cytosolic proteins that are differentially expressed in pancreatic disease. A malignant cell often differs from a normal cell by a differential expression of one or more proteins. These differentially expressed proteins, and the fragments thereof, are important markers for the diagnosis of pancreatic disease, as well as other cancers. The differentially expressed proteins of the present invention and the nucleic acids encoding said proteins and the fragments of said proteins are referred to herein as pancreatic cancer associated target, PCAT proteins or PCAT nucleic acids or PCAT peptides, respectively.

[0008] The present invention provides peptides and protein differentially expressed in pancreatic diseases (hereinafter PCAT), particularly pancreatic cancer. Based on the site of protein localization, e.g., surface or cytosolic, and protein characterization, e.g. receptor or enzyme, specific uses of these PCATs are provided. Some of the PCATs of the present invention serve as targets for one or more classes of therapeutic agents, while others may be suitable for antibody therapeutics.

[0009] Accordingly, the present invention provides a method for diagnosing or detecting a pancreatic disease in a subject comprising: determining the level of one or more PCAT proteins, or any fragment(s) thereof, in a test sample from said subject, wherein said PCAT protein comprises a sequence selected from a group consisting of SEQ ID NOS: 1-288; wherein a differential level of said PCAT protein(s) or fragment(s) in said sample relative to the level of said protein(s) or fragment(s) in a test sample from a healthy subject, or the level established for a healthy subject, is indicative of pancreatic disease.

[0010] The present invention also provides a method for detecting a pancreatic disease in a subject comprising: determining the level of one or more PCAT peptide(s) comprising a peptide sequence selected from a group consisting of SEQ ID NOS: 703-873 in a test sample from said subject, wherein a differential level of said PCAT peptide(s) in said sample to the level of said PCAT peptide(s) in a test sample from a healthy subject, or the level of said PCAT peptide(s) established for a healthy subject, is indicative of the pancreatic disease.

[0011] The present invention further provides a method for detecting a pancreatic disease in a subject comprising: determining the level of one or more PCAT nucleic acid(s), or any fragment(s) thereof, in a test sample from said subject, wherein said PCAT nucleic acid(s) encode a PCAT protein sequence selected from a group consisting of SEQ ID NOS: 1-288; wherein a differential level of said PCAT nucleic acids or fragment(s) in said sample relative to the level of said protein(s) or fragment(s) in a test sample from a healthy subject, or the level established for a healthy subject, is indicative of the pancreatic disease.

[0012] The invention also provides methods for detecting the PCAT peptides, gene or mRNA in a test sample for use in diagnosing the presence, absence or progression of a disease. The test sample includes but is not limited to a biological sample such as tissue, blood, serum or biological fluid.

[0013] The present invention further provides a purified antibody that binds specifically to a protein molecule, or any fragment thereof, selected from a group consisting of SEQ ID NOS: 1-288.

[0014] The present invention further provides a composition comprising an antibody that binds to a protein selected from a group consisting of SEQ ID NOS: 1-288, and an acceptable carrier.

[0015] The present invention further provides a method for treating a pancreatic disease, comprising administering to a patient in need of said treatment a therapeutically effective amount of one or more antibody(ies) of this invention.

[0016] The present invention further provides a method for treating a pancreatic disease comprising (i) identifying a subject having pancreatic disease and (ii) administering to a said patient a therapeutically effective amount of one or more antibody(ies) of this invention.

[0017] The present invention further provides a method to screen for agents that modulate PCAT protein activity, comprising the steps of (i) contacting a test agent with a PCAT protein and (ii) assaying for PCAT protein activity, wherein a change in said activity in the presence of said agent relative to PCAT protein activity in the absence of said agent indicates said agent modulates said PCAT protein activity.

[0018] The present invention further provides a method to screen for agents that bind to PCAT proteins, comprising the steps of (i) contacting a test agent with a PCAT protein and (ii) measuring the level of binding of agent to said PCAT protein.

[0019] The invention also provides diagnostic methods for human disease, in particular for pancreatic cancer, its metastatic stage, and therapeutic potential.

[0020] The present invention further provides diagnostic method for epithelial-cell related cancers. In particular, pancreas, lung, colon, prostate, ovarian, breast, bladder renal, hepatocellular, pharyngeal, and gastric cancers.

[0021] The invention also provides a method for monitoring the disease progression and the treatment progress.

[0022] The invention further provide a method of diagnosis by an array, wherein the array is immobilized with two or more PCAT proteins, peptides or nucleic acid molecules. The proteins, peptides or nucleic acid molecules include but are not limited to the SEQ ID NOS: 1-873.

[0023] The invention also provides monoclonal or polyclonal antibodies and composition thereof reactive with antigenic portion of PCAT protein, peptides or fragments thereof in a form for use in pancreatic diseases diagnosis.

[0024] The invention further provides an immunogenic antibody for treating pancreatic disease or diseases associated with pancreatic diseases, preferably pancreatic cancer.

[0025] The present invention provides a method for screening agents that modulate PCAT activity, comprising the steps of (a) contacting a sample comprising a PCAT with an agent; and (b) assaying for PCAT activity, wherein a change in said PCAT activity in the presence of said agent relative to PCAT activity in the absence of said compound indicates said agent modulates PCAT. The agents include but are not limited to protein, peptide, antibody, nucleic acid such as antisense RNA, RNAi fragments, small molecules.

[0026] The present invention further provides a method for treating pancreatic diseases, comprising: administering to a patient one or more agents in a therapeutically effective amount to treat pancreatic diseases.

[0027] The present invention provides a method for treating pancreatic diseases, comprising: identifying a subject having pancreatic diseases; and administering to a patient to one or more antibodies in a therapeutically effective amount to treat pancreatic diseases.

[0028] The present invention further provide method for diagnosis and treatment for pancreatic cancer.

[0029] The present invention further provides therapeutic potential for epithelial-cell related cancers. In particular pancreas, lung, colon, prostate, ovarian, breast, bladder renal, hepatocellular, pharyngeal and gastric cancers.

### Description of the Files Contained on the CD-R Named CL001538CDR

[0030] The CD-R named CL001538CDR contains the following three text (ASCII) files:

1) File SEQLIST_{—}1538 DIV.txt provides the Sequence Listing. The Sequence Listing provides the protein sequences (SEQ ID NOS: 1-288); transcript sequences (SEQ ID NOS: 289-702) and peptide sequences (SEQ ID NOS: 703-873) as shown in Table 2. File SEQLIST_{—}1538 DIV.txt is 3,231 KB in size.
2) File Table1_{—}1538.txt is 185 KB in size.
3) File Table2_{—}1538.txt is 316 KB in size.

[0031] The material contained on the CD-R labeled CL001538 CDR is hereby incorporated by reference pursuant to 37 CFR 1.77(b)(4).

LENGTHY TABLES
The patent application contains a lengthy table section. A copy of the table is available in electronic form from the USPTO web site (http://seqdata.uspto.gov/?pageRequest=docDetail&DocID=US20150132286A1). An electronic copy of the table will also be available from the USPTO upon request and payment of the fee set forth in 37 CFR 1.19(b)(3).

### Description of Table 1 and Table 2

[0032] Table 1 (provided on the CD-R) discloses the peptides which correspond to the protein, the pancreatic cancer cell lines, the expression information, the ratio compare to the control sample. The expression is based on measuring the level of the peptides. Numerical representation of overexpression is indicated by more than two, whereas numerical representation of underexpression is indicated by less than 0.5. Overexpressed singleton indicates that the peptide peak in diseased sample was detected and there was no peak detected in control samples. Underexpressed singleton indicates that the peptide peak was detected in the control sample and there was no peak in the diseased sample.

[0033] Table 2 (provided on the CD-R) discloses the PCAT proteins, transcripts, and peptides sequences that correlated to the Table 1.

[0034] The transcript/protein information includes:

[0035] a protein number (1 through 288)

[0036] a Celera protein internal identification number for the protein encoded by the Celera transcript (hCP and/or UID)

[0037] a public protein accession number (Genbank e.g., RefSeq NP number, Swiss-prot, or Derwent) for the protein

[0038] an art-known gene/protein name

[0039] a Celera transcript internal identification number (hCT and/or UID)

[0040] a public transcript accession number (Genbank e.g., RefSeq NM number, or Derwent)

[0041] a Celera hCG and UID internal identification numbers for the gene

[0042] an art-known gene symbol

[0043] Celera genomic axis position (indicating start nucleotide position-stop nucleotide position)

[0044] the chromosome number of the chromosome on which the gene is located

[0045] an OMIM (Online Mendelian Inheritance in Man; Johns Hopkins University/NCBI) public reference number for obtaining further information regarding the medical significance of each gene

[0046] alternative gene/protein name(s) and/or symbol(s) in the OMIM entry

### DESCRIPTION OF FIGURES

[0047] FIG. 1. Tissue Factor expression in various tumor types by immunohistochemistry.

[0048] FIG. 2. Kunitz-type 1 protease inhibitor expression in various tumor types by immunohistochemistry.

[0049] FIG. 3. Mucin 4 expression in various tumor types by immunohistochemistry.

[0050] FIG. 4. Kunitz-type 1 protease inhibitor mRNA expression in pancreatic cell lines. Kunitz-type 1 protease inhibitor mRNA expression was measured across the pancreatic cell line panel and calculated as fold difference from the reference cell line Hs766t. mRNA expression was found to be over-expressed in several of the cell lines relative to Hs766t, including the SU.86.86 cell line consistent ICAT data collected by mass spectrometry.

[0051] FIG. 5. Caspase 3/7 Analysis of Mucin 4 (PA-116) knockdown. Mucin siRNA induced apoptosis of ASPC-1 cells 3 days after transfection, and level of apoptosis was dose-dependent on muscin siRNA (n=3). The level of apoptosis on day 3 was similar to that given by TRAIL+actinomycin D positive control.

[0052] FIG. 6. Knockdown effects on MTS proliferation. Mucin 4 siRNA inhibited the proliferation of ASPC-1 cells (n=3). The level of inhibition was shown to be dose-dependent on the concentration of Mucin 4 siRNA (n=3)

[0053] FIG. 7. Viability test on Mucin 4 (PA-116) siRNA after transfection. The result shows that Mucin siRNA can inhibit about 50% of viable ASPC-1 cells 3 days after transfection (n=2)

[0054] FIG. 8. Analysis of individual Mucin 4 (PA-116) siRNA vs. SMARTPool. The result shows that both SMARTPool Mucin 4 siRNA and Mucin 4 duplex1 siRNA can induce an inhibition of proliferation and an increase in apoptosis 3 days after transfection

[0055] FIG. 9. Morphology of ASPC-1 Pancreatic Cancer Cells with Mucin 4 SiRNA

[0056] FIG. 10. Target protein expression was measured in whole cell extracts prepared from the pancreatic cell line panel. Polyclonal antibodies raised in rabbits (Green Mountain Antibodies) were used to detect Gs3786 or Retinol Dehydrogenase Type II homolog. Targets were found to be over-expressed in several cell lines relative to the reference cell line Hs766t.

### DETAILED DESCRIPTION OF THE PREFERRED EMBODIMENTS

### General Description

[0057] While the broadest definition of this invention is set forth in the Summary of the Invention, certain nucleic acids, peptides or proteins are preferred. For example a preferred method for detecting a pancreatic disease by determining the level of one or more PCAT protein(s) or any fragment(s) thereof is wherein the level of PCAT protein(s) are determined by contacting one or more antibody(ies) that specifically bind to the antigenic regions of the PCAT protein(s). Further preferred is a method wherein the level of two or more proteins are determined, more preferred wherein the level of four or more proteins are determined and most preferred wherein the level of eight or more proteins are determined.

[0058] A preferred method for detecting a pancreatic disease by determining the level of one or more PCAT peptide(s) is wherein the level of PCAT peptides(s) are determined by contacting one or more antibody(ies) that specifically bind to the antigenic regions of the PCAT peptide(s). Further preferred is a method wherein the level of five or more peptides are determined, more preferred wherein the level of ten or more peptides are determined and most preferred wherein the level of fifteen or more peptides are determined.

[0059] A preferred method for detecting a pancreatic disease by determining the level of one or more PCAT nucleic acid(s) is wherein the level of said PCAT nucleic acid(s) is determined by contacting one or more probes that specifically hybridize to said nucleic acid(s). Further preferred is a method wherein the level of two or more nucleic acids are determined, more preferred wherein the level of four or more nucleic acids are determined and most preferred wherein the level of eight or more nucleic acids are determined.

[0060] The methods for detecting a pancreatic disease provided by the present invention may be used for diagnosing the presence of disease in a patent, monitoring the presence of pancreatic disease in patients undergoing treatment and testing for the reoccurrence of pancreatic disease in patients that were successfully treated for the pancreatic disease; preferably wherein the pancreatic disease is pancreatic cancer. The test sample may be, but is not limited to, a biological sample such as tissue, blood, serum or biological fluid.

[0061] The present invention is based on the discovery of protein(s) and peptide(s) that are differentially expressed in pancreatic disease samples, for example, cancer sample versus normal pancreatic samples. These proteins and peptide, and the encoding nucleic acid molecules are associated with pancreatic diseases, hereinafter the PCAT proteins, peptides or nucleic acids.

[0062] The discovery of disease specific target proteins is base on discoveries made using proteomics techniques. The method uses on MALDI-TOF TOF LC/MS analyses platform to generate protein expression profiles from pancreatic disease tissues or cell lines in an effort to discover and identify novel molecules associated with the disease.

[0063] Based on these discoveries, the present invention provides proteins, peptides, nucleic acids that are differential in pancreatic diseases, as well as antibodies binds to the proteins or peptides. The present invention also provides methods for detection, monitoring, diagnosis, prognosis, preventive and treatment of pancreatic diseases. The present invention provides a detection reagent, markers for pancreatic diseases at various stages, comprises PCAT sequences isolated from human pancreatic disease tissue, sera, cell lines, blood or biological fluids.

[0064] The present invention provides a method for treating pancreatic diseases targeting at PCAT. The treatment includes administration of a therapeutically effective amount of composition comprise, but not limit to, an antibody, an immunogenic peptide which induces T cell response, a small molecule, a protein or a nucleic acid molecule. The composition further comprises an agonist or antagonist to PCAT. A “Pancreatic disease” can include pancreatic cancer, pancreatic tumor (exocrine or endocrine), pancreatic cysts, acute pancreatitis, chronic pancreatitis, diabetes (type I and II) as well as pancreatic trauma, preferably pancreatic cancer.

[0065] The present invention may further provide a diagnostic or therapeutic potential for epithelial-cell related cancers, which include but are not limited to pancreas, lung, colon, prostate, ovarian, breast, bladder renal, hepatocellular, pharyngeal and gastric cancers.

[0066] The present invention further provides the target for screening an agent for PCAT, wherein the agent is compounds of small molecules, proteins, peptides, nucleic acids, antibodies or other agonists or antagonists.

[0067] Specifically, the following targets are selected for targeting purpose: Tissue Factor, GS3786, Na/K ATPase Beta-3, Kunitz Type inhibitor-2 (HAI-2), CD46, CD166, Neutral Amino Acid Transporter (ASCT2), Transglutaminase-2 (TGM2), Kunitz Inhibitor-1, ErbB3, Mucin 4, Decay Accelerating Factor (DAF). These factors are associated with pancreatic cancer and are the potential target for treating pancreatic cancer.

[0068] Tissue factor is known for its function for activation of fVII resulting in generation of tumor growth promoting factors. fVIIa is known to bind TF and may stimulate mitogenic signaling and inhibit apoptosis of tumor cells.

[0069] Mucin 4 is a transmembrane mucin composed of two subunits (alpha and beta) generated from proteolytic cleavage (beta is transmembrane, alpha is extracellular). Mucin 4 and erbB2 is localized to the apical membrane and stimulates differentiation of polarized epithelium. Expression of neuregulin[NRG] by stromal elements enables erbB2/erbB3 complex formation which stimulates proliferation. Loss of polarization of epithelial cell allows Mucin 4/erbB2 and erbB3 complex formation, which potentiates proliferative signaling. ErbB3 is unique among the ErbB receptor family in that it possesses little or no intrinsic tyrosine kinase activity. When ErbB3 is co-expressed with ErbB2, an active signaling complex is formed and antibodies directed against ErbB2 are capable of disrupting this complex. Monoclonal antibody against ErbB3 has an agonistic effect on the anchorage-independent growth of cell lines expressing this receptor (Rajkumar et al., British J. Cancer, 70(3): 459-465 (1994)).

[0070] Kunitz Type Protease Inhibitor-1, also called HAI-1, Serine protease inhibitors or serpins. HAI is associate with hepatocyte growth factor HGF/scatter factor/SF which is thought to play an important role in the regeneration of injured gastrointestinal mucosa by promoting the proliferation and migration of epithelial cells. HGF is activated by HGFA which is activated locally by thrombin. HAI-1 is upregulated and inhibits and sequesters HGFA at the site of injury, thereby ensuring pericellular activation of HGF through upregulation of injury associated proteases. HGFA is released from HAI-1 upon cleavage with cell surface metalloprotease.

[0071] Neutral Amino Acid Transporter (ASCT2) is a member of ASC/B0 amino acid transporter and it functions as Na+ dependent glutamine transport.

[0072] Decay accelerating factor (CD55)'s primary function is to inactivate the C3 convertases of the complement cascade by dissociating them into their constituent proteins. It is expressed on all serum exposed cells and provides protection from complement activated proteases.

### PCAT Peptide/Proteins and Peptides

[0073] The present invention provides isolated PCAT peptide and protein molecules that consisting of, consisting essentially of, or comprising the amino acid sequences of the PCAT peptides and proteins disclosed in the Tables 1 and 2, (encoded by the nucleic acid molecule shown in Table 2), as well as all obvious variants of these peptides that are within the art to make and use. Some of these variants are described in detail below.

[0074] In one embodiment PCAT peptides include, but are not limited to, the amino acid sequence of SEQ ID NOS: 703-873 and variants thereof. A PCAT protein includes, but is not limited to, the amino acid sequence of SEQ ID NOS: 1-288 and variants thereof. PACT proteins may be differentially expressed in pancreatic cell line, blood, tissue, serum or body fluids.

[0075] The peptide or protein or fragment thereof, to which the invention pertains, however, are not to be construed as encompassing peptide, protein or fragment that may be disclosed publicly prior to the present invention.

[0076] The PCAT proteins and peptides of the present invention can be purified to homogeneity or other degrees of purity. The level of purification will be based on the intended use. The critical feature is that the preparation allows for the desired function of the peptide, even if in the presence of considerable amounts of other components (the features of an isolated nucleic acid molecule is discussed below).

[0077] As used herein, a “peptide” is defined as amino acid sequences between 5-20 amino acids derived from PCAT proteins such as SEQ ID NOS: 1-288 or variants thereof. The peptide differentially expressed in either pancreatic diseases cell line, blood, tissue, serum or body fluids. In one embodiment peptides include, but are not limited to, the amino acid sequence of SEQ ID NOS: 703-873, or variants thereof.

[0078] As used herein, a “protein” is full-length protein differentially expressed in pancreatic diseases cell line, tissue, blood, serum or body fluids. A protein includes, but is not limited to, the amino acid sequence of SEQ ID NOS: 1-288.

[0079] A peptide is said to be “isolated” or “purified” when it is substantially free of cellular material or free of chemical precursors or other chemicals. The peptides of the present invention can be purified to homogeneity or other degrees of purity. The level of purification will be based on the intended use. The critical feature is that the preparation allows for the desired function of the peptide, even if in the presence of considerable amounts of other components (the features of an isolated nucleic acid molecule are discussed below).

[0080] In some uses, “substantially free of cellular material” includes preparations of the peptide having less than about 30% (by dry weight) other proteins (i.e., contaminating protein), less than about 20% other proteins, less than about 10% other proteins, or less than about 5% other proteins. When the peptide is recombinantly produced, it can also be substantially free of culture medium, i.e., culture medium represents less than about 20% of the volume of the protein preparation.

[0081] The language “substantially free of chemical precursors or other chemicals” includes preparations of the peptide in which it is separated from chemical precursors or other chemicals that are involved in its synthesis. In one embodiment, the language “substantially free of chemical precursors or other chemicals” includes preparations of the PCAT peptide having less than about 30% (by dry weight) chemical precursors or other chemicals, less than about 20% chemical precursors or other chemicals, less than about 10% chemical precursors or other chemicals, or less than about 5% chemical precursors or other chemicals.

[0082] The isolated PCAT proteins and peptide can be purified from cells that naturally express it, purified from cells that have been altered to express it (recombinant), or synthesized using known protein synthesis methods. Sambrook et al., Molecular Cloning: A Laboratory Manual. 3rd. ed., Cold Spring Harbor Laboratory Press, Cold Spring Harbor, N.Y., (2001). Experimental data as provided in Table 1 indicates expression in humans pancreatic cell lines. For example, a nucleic acid molecule encoding the PCAT protein or peptide is cloned into an expression vector, the expression vector introduced into a host cell and the protein expressed in the host cell. The protein or peptide can then be isolated from the cells by an appropriate purification scheme using standard protein purification techniques. Many of these techniques are described in detail below.

[0083] A PCAT peptide or protein can be attached to heterologous sequences to form chimeric or fusion proteins. Such Schimeric and fusion proteins comprise a peptide operatively linked to a heterologous protein having an amino acid sequence not substantially homologous to the peptide. “Operatively linked” indicates that the peptide and the heterologous protein are fused in-frame. The heterologous protein can be fused to the N-terminus or C-terminus of the peptide.

[0084] In some uses, the fusion protein does not affect the activity of the peptide or protein per se. For example, the fusion protein can include, but is not limited to, fusion proteins, for example beta-galactosidase fusions, yeast two-hybrid GAL fusions, poly-His fusions, MYC-tagged, HI-tagged and Ig fusions. Such fusion proteins, particularly poly-His fusions, can facilitate the purification of recombinant PCAT proteins or peptides. In certain host cells (e.g., mammalian host cells), expression and/or secretion of a protein can be increased by using a heterologous signal sequence.

[0085] A chimeric or fusion PCAT protein or peptide can be produced by standard recombinant DNA techniques. For example, DNA fragments coding for the different protein sequences are ligated together in-frame in accordance with conventional techniques. In another embodiment, the fusion gene can be synthesized by conventional techniques including automated DNA synthesizers. Alternatively, PCR amplification of gene fragments can be carried out using anchor primers which give rise to complementary overhangs between two consecutive gene fragments which can subsequently be annealed and re-amplified to generate a chimeric gene sequence (see Ausubel et al., Current Protocols in Molecular Biology, 1992). Moreover, many expression vectors are commercially available that already encode a fusion moiety (e.g., a GST protein). A PCAT-encoding nucleic acid can be cloned into such an expression vector such that the fusion moiety is linked in-frame to the PCAT protein or peptide.

[0086] As mentioned above, the PCAT peptide or the PCAT protein has obvious variants of the amino acid sequence, such as naturally occurring mature forms of the PCAT, allelic/sequence variants of the PCAT, non-naturally occurring recombinantly derived variants of the PCAT, and orthologs and paralogs of the PCAT proteins or peptides. Such variants can readily be generated using art-known techniques in the fields of recombinant nucleic acid technology and protein biochemistry.

[0087] It is understood, however, that PCAT and variants exclude any amino acid sequences disclosed prior to the invention.

[0088] Such variants can readily be identified/made using molecular techniques and the sequence information disclosed herein. Further, such variants can readily be distinguished from other peptides based on sequence and/or structural homology to the PCAT peptides of the present invention. The degree of homology/identity present will be based primarily on whether the peptide is a functional variant or non-functional variant, the amount of divergence present in the paralog family and the evolutionary distance between the orthologs.

[0089] To determine the percent identity of two amino acid sequences or two nucleic acid sequences, the sequences are aligned for optimal comparison purposes (e.g., gaps can be introduced in one or both of a first and a second amino acid or nucleic acid sequence for optimal alignment and non-homologous sequences can be disregarded for comparison purposes). In a preferred embodiment, at least 30%, 40%, 50%, 60%, 70%, 80%, or 90% or more of the length of a reference sequence is aligned for comparison purposes. The amino acid residues or nucleotides at corresponding amino acid positions or nucleotide positions are then compared. When a position in the first sequence is occupied by the same amino acid residue or nucleotide as the corresponding position in the second sequence, then the molecules are identical at that position (as used herein amino acid or nucleic acid “identity” is equivalent to amino acid or nucleic acid “homology”). The percent identity between the two sequences is a function of the number of identical positions shared by the sequences, taking into account the number of gaps, and the length of each gap, which need to be introduced for optimal alignment of the two sequences.

[0090] The comparison of sequences and determination of percent identity and similarity between two sequences can be accomplished using a mathematical algorithm. (Computational Molecular Biology, Lesk, A. M., ed., Oxford University Press, New York, 1988; Biocomputing: Informatics and Genome Projects, Smith, D. W., ed., Academic Press, New York, 1993; Computer Analysis of Sequence Data, Part 1, Griffin, A. M., and Griffin, H. G., eds., Humana Press, New Jersey, 1994; Sequence Analysis in Molecular Biology, von Heinje, G., Academic Press, 1987; and Sequence Analysis Primer, Gribskov, M. and Devereux, J., eds., M Stockton Press, New York, 1991). In a preferred embodiment, the percent identity between two amino acid sequences is determined using the Needleman and Wunsch (J. Mol. Biol. (48):444-453 (1970)) algorithm which has been incorporated into the GAP program in the GCG software package, using either a Blossom 62 matrix or a PAM250 matrix, and a gap weight of 16, 14, 12, 10, 8, 6, or 4 and a length weight of 1, 2, 3, 4, 5, or 6. In yet another preferred embodiment, the percent identity between two nucleotide sequences is determined using the GAP program in the GCG software package (Devereux, J., et al., Nucleic Acids Res. 12(1):387 (1984)), using a NWSgapdna.CMP matrix and a gap weight of 40, 50, 60, 70, or 80 and a length weight of 1, 2, 3, 4, 5, or 6. In another embodiment, the percent identity between two amino acid or nucleotide sequences is determined using the algorithm of E. Myers and W. Miller (CABIOS, 4:11-17 (1989)) which has been incorporated into the ALIGN program (version 2.0), using a PAM120 weight residue table, a gap length penalty of 12 and a gap penalty of 4.

[0091] The nucleic acid and protein sequences of the present invention can further be used as a “query sequence” to perform a search against sequence databases to, for example, identify other family members or related sequences. Such searches can be performed using the NBLAST and XBLAST programs (version 2.0) of Altschul, et al. (J. Mol. Biol. 215:403-10 (1990)). BLAST nucleotide searches can be performed with the NBLAST program, score=100, wordlength=12 to obtain nucleotide sequences homologous to the nucleic acid molecules of the invention. BLAST protein searches can be performed with the XBLAST program, score=50, wordlength=3 to obtain amino acid sequences homologous to the proteins of the invention. To obtain gapped alignments for comparison purposes, Gapped BLAST can be utilized as described in Altschul et al. (Nucleic Acids Res. 25(17):3389-3402 (1997)). When utilizing BLAST and gapped BLAST programs, the default parameters of the respective programs (e.g., XBLAST and NBLAST) can be used.

[0092] Full-length pre-processed forms, as well as mature processed forms, of proteins that comprise one of the peptides of the present invention can readily be identified as having complete sequence identity to one of the PCAT peptides of the present invention as well as being encoded by the same genetic locus as the PCAT peptide provided herein (See Table 2).

[0093] Allelic variants of a PCAT peptide can readily be identified as being a human protein having a high degree (significant) of sequence homology/identity to at least a portion of the PCAT peptide as well as being encoded by the same genetic locus as the PCAT peptide provided herein. Genetic locus can readily be determined based on the genomic information provided in Table 2, such as the genomic sequence mapped to the reference human. As used herein, two proteins (or a region of the proteins) have significant homology when the amino acid sequences are typically at least about 70-80%, 80-90%, and more typically at least about 90-95% or more homologous. A significantly homologous amino acid sequence, according to the present invention, will be encoded by a nucleic acid sequence that will hybridize to a PCAT peptide encoding nucleic acid molecule under stringent conditions as more fully described below.

[0094] Paralogs of a PCAT peptide can readily be identified as having some degree of significant sequence homology/identity to at least a portion of the PCAT peptide, as being encoded by a gene from humans, and as having similar activity or function. Two proteins will typically be considered paralogs when the amino acid sequences are typically at least about 60% or greater, and more typically at least about 70% or greater homology through a given region or domain. Such paralogs will be encoded by a nucleic acid sequence that will hybridize to a PCAT peptide encoding nucleic acid molecule under moderate to stringent conditions as more fully described below.

[0095] Orthologs of a PCAT peptide can readily be identified as having some degree of significant sequence homology/identity to at least a portion of the PCAT peptide as well as being encoded by a gene from another organism. Preferred orthologs will be isolated from mammals, preferably primates, for the development of human therapeutic targets and agents. Such orthologs will be encoded by a nucleic acid sequence that will hybridize to a PCAT peptide encoding nucleic acid molecule under moderate to stringent conditions, as more fully described below, depending on the degree of relatedness of the two organisms yielding the proteins.

[0096] Non-naturally occurring variants of the PCAT peptides of the present invention can readily be generated using recombinant techniques. Such variants include, but are not limited to deletions, additions and substitutions in the amino acid sequence of the PCAT peptide. For example, one class of substitutions is conserved amino acid substitution. Such substitutions are those that substitute a given amino acid in a PCAT peptide by another amino acid of like characteristics. Typically seen as conservative substitutions are the replacements, one for another, among the aliphatic amino acids Ala, Val, Leu, and Ile; interchange of the hydroxyl residues Ser and Thr; exchange of the acidic residues Asp and Glu; substitution between the amide residues Asn and Gln; exchange of the basic residues Lys and Arg; and replacements among the aromatic residues Phe and Tyr. Guidance concerning which amino acid changes are likely to be phenotypically silent are found in Bowie et al., Science 247:1306-1310 (1990).

[0097] Variant PCAT peptides can be fully functional or can lack function in one or more activities, e.g. ability to bind substrate, ability to phosphorylate substrate, ability to mediate signaling, etc. Fully functional variants typically contain only conservative variation or variation in non-critical residues or in non-critical regions.

[0098] Non-functional variants typically contain one or more non-conservative amino acid substitutions, deletions, insertions, inversions, or truncation or a substitution, insertion, inversion, or deletion in a critical residue or critical region.

[0099] Amino acids that are essential for function can be identified by methods known in the art, such as site-directed mutagenesis or alanine-scanning mutagenesis (Cunningham et al., Science 244:1081-1085 (1989)). The latter procedure introduces single alanine mutations at every residue in the molecule. The resulting mutant molecules are then tested for biological activity such as PCAT activity or in assays such as an in vitro proliferative activity. Sites that are critical for binding partner/substrate binding can also be determined by structural analysis such as crystallization, nuclear magnetic resonance or photoaffinity labeling (Smith et al., J. Mol. Biol. 224:899-904 (1992); de Vos et al. Science 255:306-312 (1992)).

[0100] The present invention further provides fragments of the PCATs, in addition to proteins and peptides that comprise and consist of such fragments, particularly those comprising the residues identified in Tables 1 and 2. As used herein, a fragment comprises at least 8, 10, 12, 14, 16, 18, 20 or more contiguous amino acid residues from a PCAT. Such fragments can be chosen based on the ability to retain one or more of the biological activities of the PCAT or could be chosen for the ability to perform a function, e.g. bind a substrate or act as an immunogen. Particularly important fragments are biologically active fragments, peptides that are, for example, about 8 or more amino acids in length. Such fragments will typically comprise a domain or motif of the PCAT, e.g., active site, a transmembrane domain or a substrate-binding domain. Further, possible fragments include, but are not limited to, domain or motif containing fragments, soluble peptide fragments, and fragments containing immunogenic structures. Predicted domains and functional sites are readily identifiable by computer programs well known and readily available to those of skill in the art (e.g., PROSITE analysis).

[0101] Polypeptides often contain amino acids other than the 20 amino acids commonly referred to as the 20 naturally occurring amino acids. Further, many amino acids, including the terminal amino acids, may be modified by natural processes, such as processing and other post-translational modifications, or by chemical modification techniques well known in the art. Common modifications that occur naturally in PCATs are described in basic texts, detailed monographs, and the research literature, and they are well known to those of skill in the art.

[0102] Known modifications include, but are not limited to, acetylation, acylation, ADP-ribosylation, amidation, covalent attachment of flavin, covalent attachment of a heme moiety, covalent attachment of a nucleotide or nucleotide derivative, covalent attachment of a lipid or lipid derivative, covalent attachment of phosphotidylinositol, cross-linking, cyclization, disulfide bond formation, demethylation, formation of covalent crosslinks, formation of cystine, formation of pyroglutamate, formylation, gamma carboxylation, glycosylation, GPI anchor formation, hydroxylation, iodination, methylation, myristoylation, oxidation, proteolytic processing, phosphorylation, prenylation, racemization, selenoylation, sulfation, transfer-RNA mediated addition of amino acids to proteins such as arginylation, and ubiquitination.

[0103] Such modifications are well known to those of skill in the art and have been described in great detail in the scientific literature. Several particularly common modifications, glycosylation, lipid attachment, sulfation, gamma-carboxylation of glutamic acid residues, hydroxylation and ADP-ribosylation, for instance, are described in most basic texts, such as Proteins—Structure and Molecular Properties, 2nd Ed., T. E. Creighton, W. H. Freeman and Company, New York (1993). Many detailed reviews are available on this subject, such as by Wold, F., Posttranslational Covalent Modification of Proteins, B. C. Johnson, Ed., Academic Press, New York 1-12 (1983); Seifter et al. (Meth. Enzymol. 182: 626-646 (1990)) and Rattan et al. (Ann. N.Y. Acad. Sci. 663:48-62 (1992)).

[0104] Accordingly, the PCATs of the present invention also encompass derivatives or analogs in which a substituted amino acid residue is not one encoded by the genetic code, in which a substituent group is included, in which the mature PCAT is fused with another compound, such as a compound to increase the half-life of the PCAT (for example, polyethylene glycol), or in which the additional amino acids are fused to the mature PCAT, such as a leader or secretory sequence or a sequence for purification of the mature PCAT or a pro-protein sequence.

### Protein/Peptide Uses

[0105] The proteins of the present invention can be used in substantial and specific assays related to the functional information provided in the Tables; to raise antibodies or to elicit another immune response; as a reagent (including the labeled reagent) in assays designed to quantitatively determine levels of the protein (or its binding partner or ligand) in biological fluids; and as markers for tissues in which the corresponding protein is preferentially expressed (either constitutively or at a particular stage of tissue differentiation or development or in a disease state). Where the protein binds or potentially binds to another protein or ligand (such as, for example, in a PCAT-effector protein interaction or PCAT-ligand interaction), the protein can be used to identify the binding partner/ligand so as to develop a system to identify inhibitors of the binding interaction. Any or all of these uses are capable of being developed into reagent grade or kit format for commercialization as commercial products.

[0106] Methods for performing the uses listed above are well known to those skilled in the art. References disclosing such methods include “Molecular Cloning: A Laboratory Manual”, 3rd ed., Cold Spring Harbor Laboratory Press, Sambrook, J., E. F. Fritsch and T. Maniatis eds., 2001, and “Methods in Enzymology: Guide to Molecular Cloning Techniques”, Academic Press, Berger, S. L. and A. R. Kimmel eds., 1987.

[0107] The potential uses of the peptides of the present invention are based primarily on the source of the protein as well as the class/action of the protein. For example, PCATs isolated from humans and their human/mammalian orthologs serve as targets for identifying agents for use in mammalian therapeutic applications, e.g. a human drug, particularly in modulating a biological or pathological response in a cell or tissue that expresses the PCAT. Experimental data as provided in Table 1 indicate that the PCATs of the present invention are expressed at differential level in various pancreatic cell lines, for example SEQ ID NOS: 1-119 are overexpressed in all tested cell lines, whereas other proteins or peptides are underexpressed in selected cell lines. In one example, protein (SEQ ID NO: 120) or peptide (SEQ ID NO: 761) is overexpressed in one cell line (HPAC), yet underexpressed in another cell line (Su.86.86). A large percentage of pharmaceutical agents are being developed that modulate the activity of PCAT proteins, particularly members of the PCAT subfamily (see Background of the Invention). The structural and functional information provided in the Background and Figures provide specific and substantial uses for the molecules of the present invention, particularly in combination with the expression information provided in Table1. Experimental data as provided in Table 1 indicates expression in humans pancreatic cell lines. Such uses can readily be determined using the information provided herein, that which is known in the art, and routine experimentation.

[0108] The proteins of the present invention (including variants and fragments that may have been disclosed prior to the present invention) are useful for biological assays related to PCATs that are related to members of the PCAT subfamily. Such assays involve any of the known PCAT functions or activities or properties useful for diagnosis and treatment of PCAT-related conditions that are specific for the subfamily of PCATs that the one of the present invention belongs to, particularly in cells and tissues that express the PCAT. Experimental data as provided in Table 1 indicate that the PCATs of the present invention are expressed at differential level in various pancreatic cell lines, for example SEQ ID NOS: 1-119 are overexpressed in all tested cell lines, whereas other proteins or peptides are underexpressed in selected cell lines. In one example, protein (SEQ ID NO: 120) or peptide (SEQ ID NO: 761) is overexpressed in one cell line (HPAC), yet underexpressed in another cell line (Su.86.86).

[0109] The proteins of the present invention are also useful in drug screening assays, in cell-based or cell-free systems. Cell-based systems can be native, i.e., cells that normally express the PCAT, as a biopsy or expanded in cell culture. Experimental data as provided in Table 1 indicates expression in human pancreatic cell lines. In an alternate embodiment, cell-based assays involve recombinant host cells expressing the PCAT protein.

[0110] The polypeptides can be used to identify compounds or agents that modulate PCAT activity of the protein in its natural state or an altered form that causes a specific disease or pathology associated with the PCAT. Both the PCATs of the present invention and appropriate variants and fragments can be used in high-throughput screens to assay candidate compounds for the ability to bind to the PCAT. These compounds can be further screened against a functional PCAT to determine the effect of the compound on the PCAT activity. Further, these compounds can be tested in animal or invertebrate systems to determine activity/effectiveness. Compounds can be identified that activate (agonist) or inactivate (antagonist) the PCAT to a desired degree.

[0111] Further, the proteins of the present invention can be used to screen a compound or an agent for the ability to stimulate or inhibit interaction between the PCAT protein and a molecule that normally interacts with the PCAT protein, e.g. a substrate or or an extracellular binding ligand or a component of the signal pathway that the PCAT protein normally interacts (for example, a cytosolic signal proein or another PCAT). Such assays typically include the steps of combining the PCAT protein with a candidate compound under conditions that allow the PCAT protein, or fragment, to interact with the target molecule, and to detect the formation of a complex between the protein and the target or to detect the biochemical consequence of the interaction with the PCAT protein and the target, such as any of the associated effects of signal transduction such as protein phosphorylation, cAMP turnover, and adenylate cyclase activation, etc.

[0112] Candidate compounds or agents include, for example, 1) peptides such as soluble peptides, including Ig-tailed fusion peptides and members of random peptide libraries (see, e.g., Lam et al., Nature 354:82-84 (1991); Houghten et al., Nature 354:84-86 (1991)) and combinatorial chemistry-derived molecular libraries made of D- and/or L-configuration amino acids; 2) phosphopeptides (e.g., members of random and partially degenerate, directed phosphopeptide libraries, see, e.g., Songyang et al., Cell 72:767-778 (1993)); 3) antibodies (e.g., polyclonal, monoclonal, humanized, anti-idiotypic, chimeric, and single chain antibodies as well as Fab, F(ab′)2, Fab expression library fragments, and epitope-binding fragments of antibodies); and 4) small organic and inorganic molecules (e.g., molecules obtained from combinatorial and natural product libraries).

[0113] One candidate compound or agent is a soluble fragment of the PCAT that competes for substrate binding. Other candidate compounds include mutant PCATs or appropriate fragments containing mutations that affect PCAT function and thus compete for substrate. Accordingly, a fragment that competes for substrate, for example with a higher affinity, or a fragment that binds substrate but does not allow release, is encompassed by the invention.

[0114] The invention further includes other end point assays to identify compounds that modulate (stimulate or inhibit) PCAT activity. The assays typically involve an assay of events in the signal transduction pathway that indicate PCAT activity. Thus, the phosphorylation of a substrate, activation of a protein, a change in the expression of genes that are up- or down-regulated in response to the PCAT protein dependent signal cascade can be assayed.

[0115] Any of the biological or biochemical functions mediated by the PCAT can be used as an endpoint assay. These include all of the biochemical or biochemical/biological events described herein, in the references cited herein, incorporated by reference for these endpoint assay targets, and other functions known to those of ordinary skill in the art or that can be readily identified using the information provided in the Tables, particularly Table 1. Specifically, a biological function of a cell or tissues that expresses the PCAT can be assayed. Experimental data as provided in Table 1 indicate that the PCATs of the present invention are expressed at differential level in various pancreatic cell lines, for example SEQ ID NOS: 1-119 are overexpressed in all tested cell lines, whereas other proteins or peptides are underexpressed in selected cell lines. In one example, protein (SEQ ID NO: 120) or peptide (SEQ ID NO: 761) is overexpressed in one cell line (HPAC), yet underexpressed in another cell line (Su.86.86).

[0116] Binding and/or activating compounds can also be screened by using chimeric PCAT proteins in which the amino terminal extracellular domain, or parts thereof, the entire transmembrane domain or subregions, such as any of the seven transmembrane segments or any of the intracellular or extracellular loops and the carboxy terminal intracellular domain, or parts thereof, can be replaced by heterologous domains or subregions. For example, a substrate-binding region can be used that interacts with a different substrate then that which is recognized by the native PCAT. Accordingly, a different set of signal transduction components is available as an end-point assay for activation. This allows for assays to be performed in other than the specific host cell from which the PCAT is derived.

[0117] The proteins of the present invention are also useful in competition binding assays in methods designed to discover compounds that interact with the PCAT (e.g. binding partners and/or ligands). Thus, a compound is exposed to a PCAT polypeptide under conditions that allow the compound to bind or to otherwise interact with the polypeptide. Soluble PCAT polypeptide is also added to the mixture. If the test compound interacts with the soluble PCAT polypeptide, it decreases the amount of complex formed or activity from the PCAT. This type of assay is particularly useful in cases in which compounds are sought that interact with specific regions of the PCAT. Thus, the soluble polypeptide that competes with the target PCAT region is designed to contain peptide sequences corresponding to the region of interest.

[0118] To perform cell free drug screening assays, it is sometimes desirable to immobilize either the PCAT protein, or fragment, or its target molecule to facilitate separation of complexes from uncomplexed forms of one or both of the proteins, as well as to accommodate automation of the assay.

[0119] Techniques for immobilizing proteins on matrices can be used in the drug screening assays. In one embodiment, a fusion protein can be provided which adds a domain that allows the protein to be bound to a matrix. For example, glutathione-S-transferase fusion proteins can be adsorbed onto glutathione sepharose beads (Sigma Chemical, St. Louis, Mo.) or glutathione derivatized microtitre plates, which are then combined with the cell lysates (e.g., ³⁵S-labeled) and the candidate compound, and the mixture incubated under conditions conducive to complex formation (e.g., at physiological conditions for salt and pH). Following incubation, the beads are washed to remove any unbound label, and the matrix immobilized and radiolabel determined directly, or in the supernatant after the complexes are dissociated. Alternatively, the complexes can be dissociated from the matrix, separated by SDS-PAGE, and the level of PCAT-binding protein found in the bead fraction quantitated from the gel using standard electrophoretic techniques. For example, either the polypeptide or its target molecule can be immobilized utilizing conjugation of biotin and streptavidin using techniques well known in the art. Alternatively, antibodies reactive with the protein but which do not interfere with binding of the protein to its target molecule can be derivatized to the wells of the plate, and the protein trapped in the wells by antibody conjugation. Preparations of a PCAT-binding protein and a candidate compound are incubated in the PCAT protein-presenting wells and the amount of complex trapped in the well can be quantitated. Methods for detecting such complexes, in addition to those described above for the GST-immobilized complexes, include immunodetection of complexes using antibodies reactive with the PCAT protein target molecule, or which are reactive with PCAT protein and compete with the target molecule, as well as PCAT-linked assays which rely on detecting an enzymatic activity associated with the target molecule.

[0120] Agents that modulate one of the PCATs of the present invention can be identified using one or more of the above assays, alone or in combination. It is generally preferable to use a cell-based or cell free system first and then confirm activity in an animal or other model system. Such model systems are well known in the art and can readily be employed in this context.

[0121] Modulators of PCAT protein activity identified according to these drug screening assays can be used to treat a subject with a disorder mediated by the PCAT pathway, by treating cells or tissues that express the PCAT. Experimental data as provided in Table 1 indicates expression in human pancreatic cell lines. These methods of treatment include the steps of administering a modulator of PCAT activity in a pharmaceutical composition to a subject in need of such treatment, the modulator being identified as described herein.

[0122] In yet another aspect of the invention, the PCAT proteins can be used as “bait proteins” in a two-hybrid assay or three-hybrid assay (see, e.g., U.S. Pat. No. 5,283,317; Zervos et al. (1993) Cell 72:223-232; Madura et al. (1993) J. Biol. Chem. 268:12046-12054; Bartel et al. (1993) Biotechniques 14:920-924; Iwabuchi et al. (1993) Oncogene 8:1693-1696; and Brent WO94/10300), to identify other proteins, which bind to or interact with the PCAT and are involved in PCAT activity. Such PCAT-binding proteins are also likely to be involved in the propagation of signals by the PCAT proteins or PCAT targets as, for example, downstream elements of a PCAT-mediated signaling pathway. Alternatively, such PCAT-binding proteins are likely to be PCAT inhibitors.

[0123] The two-hybrid system is based on the modular nature of most transcription factors, which consist of separable DNA-binding and activation domains. Briefly, the assay utilizes two different DNA constructs. In one construct, the gene that codes for a PCAT protein is fused to a gene encoding the DNA binding domain of a known transcription factor (e.g., GAL-4). In the other construct, a DNA sequence, from a library of DNA sequences that encode an unidentified protein (“prey” or “sample”) is fused to a gene that codes for the activation domain of the known transcription factor. If the “bait” and the “prey” proteins are able to interact, in vivo, forming a PCAT-dependent complex, the DNA-binding and activation domains of the transcription factor are brought into close proximity. This proximity allows transcription of a reporter gene (e.g., LacZ) which is operably linked to a transcriptional regulatory site responsive to the transcription factor. Expression of the reporter gene can be detected and cell colonies containing the functional transcription factor can be isolated and used to obtain the cloned gene which encodes the protein which interacts with the PCAT protein.

[0124] This invention further pertains to novel agents identified by the above-described screening assays. Accordingly, it is within the scope of this invention to further use an agent identified as described herein in an appropriate animal model. For example, an agent identified as described herein (e.g., a PCAT-modulating agent, an antisense PCAT nucleic acid molecule, an PCAT-RNAi fragment, a PCAT-specific antibody, or a PCAT-binding partner) can be used in an animal or other model to determine the efficacy, toxicity, or side effects of treatment with such an agent. Alternatively, an agent identified as described herein can be used in an animal or other model to determine the mechanism of action of such an agent. Furthermore, this invention pertains to uses of novel agents identified by the above-described screening assays for treatments as described herein.

[0125] The PCAT proteins of the present invention are also useful to provide a target for diagnosing a disease or predisposition to disease mediated by the peptide. Accordingly, the invention provides methods for detecting the presence, or levels of, the protein (or encoding mRNA) in a cell, tissue, or organism. Experimental data as provided in Table 1 indicates expression in human pancreatic cell lines. The method involves contacting a biological sample with a compound capable of interacting with the PCAT protein such that the interaction can be detected. Such an assay can be provided in a single detection format or a multi-detection format such as an antibody chip array.

[0126] One agent for detecting a protein in a sample is an antibody capable of selectively binding to protein. A biological sample includes tissues, cells and biological fluids isolated from a subject, as well as tissues, cells and fluids present within a subject.

[0127] The peptides of the present invention also provide targets for diagnosing active protein activity, disease, or predisposition to disease, in a patient having a variant peptide, particularly activities and conditions that are known for other members of the family of proteins to which the present one belongs. Thus, the peptide can be isolated from a biological sample and assayed for the presence of a genetic mutation that results in aberrant peptide. This includes amino acid substitution, deletion, insertion, rearrangement, (as the result of aberrant splicing events), and inappropriate post-translational modification. Analytic methods include altered electrophoretic mobility, altered tryptic peptide digest, altered PCAT activity in cell-based or cell-free assay, alteration in substrate or antibody-binding pattern, altered isoelectric point, direct amino acid sequencing, and any other of the known assay techniques useful for detecting mutations in a protein. Such an assay can be provided in a single detection format or a multi-detection format such as an antibody chip array.

[0128] In vitro techniques for detection of peptide include enzyme linked immunosorbent assays (ELISAs), Western blots, immunoprecipitations and immunofluorescence using a detection reagent, such as an antibody or protein binding agent. Alternatively, the peptide can be detected in vivo in a subject by introducing into the subject a labeled anti-peptide antibody or other types of detection agent. For example, the antibody can be labeled with a radioactive marker whose presence and location in a subject can be detected by standard imaging techniques. Particularly useful are methods that detect the allelic variant of a peptide expressed in a subject and methods which detect fragments of a peptide in a sample.

[0129] The peptides are also useful in pharmacogenomic analysis. Pharmacogenomics deal with clinically significant hereditary variations in the response to drugs due to altered drug disposition and abnormal action in affected persons. See, e.g., Eichelbaum, M. (Clin. Exp. Pharmacol. Physiol. 23(10-11):983-985 (1996)), and Linder, M. W. (Clin. Chem. 43(2):254-266 (1997)). The clinical outcomes of these variations result in severe toxicity of therapeutic drugs in certain individuals or therapeutic failure of drugs in certain individuals as a result of individual variation in metabolism. Thus, the genotype of the individual can determine the way a therapeutic compound acts on the body or the way the body metabolizes the compound. Further, the activity of drug metabolizing enzymes affects both the intensity and duration of drug action. Thus, the pharmacogenomics of the individual permit the selection of effective compounds and effective dosages of such compounds for prophylactic or therapeutic treatment based on the individual's genotype. The discovery of genetic polymorphisms in some drug metabolizing enzymes has explained why some patients do not obtain the expected drug effects, show an exaggerated drug effect, or experience serious toxicity from standard drug dosages. Polymorphisms can be expressed in the phenotype of the extensive metabolizer and the phenotype of the poor metabolizer. Accordingly, genetic polymorphism may lead to allelic protein variants of the PCAT protein in which one or more of the PCAT functions in one population are different from those in another population. The peptides thus allow a target to ascertain a genetic predisposition that can affect treatment modality. Thus, in a ligand-based treatment, polymorphism may give rise to amino terminal extracellular domains and/or other substrate-binding regions that are more or less active in substrate binding, and PCAT activation. Accordingly, substrate dosage would necessarily be modified to maximize the therapeutic effect within a given population containing a polymorphism. As an alternative to genotyping, specific polymorphic peptides could be identified.

The peptides are also useful for treating a disorder characterized by an absence of, inappropriate, or unwanted expression of the protein. Experimental data as provided in Table 1 indicates expression in human pancreatic cell lines. Accordingly, methods for treatment include the use of the PCAT protein or fragments.

### Antibodies

[0130] The present invention provides antibodies specifically bind to PCAT proteins or fragments thereof, peptides, or antigenic portion thereof.

[0131] The invention also provides antibodies that selectively bind to one of the peptides of the present invention, a protein comprising such a peptide, as well as variants and fragments thereof as describe above.

[0132] The antibody of present invention selectively binds a target PCAT when it binds the target domain and does not significantly bind to unrelated proteins. An antibody is still considered to selectively bind a peptide even if it also binds to other proteins that are not substantially homologous with the target peptide so long as such proteins share homology with a fragment or domain of the peptide target of the antibody. In this case, it would be understood that antibody binding to the peptide is still selective despite some degree of cross-reactivity.

[0133] The term “antibody” is used in the broadest sense, and specifically covers monoclonal antibodies (including full length monoclonal antibodies), polyclonal antibodies, multispecific antibodies (e.g., bispecific antibodies), humanized antibody and antibody fragments (e.g., Fab, F(ab′).sub.2 and Fv) so long as they exhibit the desired biological activity. Antibodies (Abs) and immunoglobulins (Igs) are glycoproteins having the same structural characteristics. While antibodies exhibit binding specificity to a specific antigen, immunoglobulins include both antibodies and other antibody-like molecules that lack antigen specificity.

[0134] As used herein, antibodies are usually heterotetrameric glycoproteins of about 150,000 daltons, composed of two identical light (L) chains and two identical heavy (H) chains. Each light chain is linked to a heavy chain by one covalent disulfide bond, while the number of disulfide linkages varies between the heavy chains of different immunoglobulin isotypes. Each heavy and light chain also has regularly spaced intrachain disulfide bridges. Each heavy chain has at one end a variable domain (VH) followed by a number of constant domains. Each light chain has a variable domain at one end (VL) and a constant domain at its other end. The constant domain of the light chain is aligned with the first constant domain of the heavy chain, and the light chain variable domain is aligned with the variable domain of the heavy chain. Particular amino acid residues are believed to form an interface between the light and heavy chain variable domains. Chothia et al., J. Mol. Biol. 186, 651-63 (1985); Novotny and Haber, Proc. Natl. Acad. Sci. USA 82 4592-4596 (1985).

[0135] An “isolated” antibody is one which has been identified and separated and/or recovered from a component of the environment in which is produced. Contaminant components of its production environment are materials that would interfere with diagnostic or therapeutic uses for the antibody, and may include enzymes, hormones, and other proteinaceous or nonproteinaceous solutes. In preferred embodiments, the antibody will be purified as measurable by at least three different methods: 1) to greater than 95% by weight of antibody as determined by the Lowry method, and most preferably more than 99% by weight; 2) to a degree sufficient to obtain at least 15 residues of N-terminal or internal amino acid sequence by use of a spinning cup sequenator; or 3) to homogeneity by SDS-PAGE under reducing or non-reducing conditions using Coomasie blue or, preferably, silver stain. Isolated antibody includes the antibody in situ within recombinant cells since at least one component of the antibody's natural environment will not be present. Ordinarily, however, isolated antibody will be prepared by at least one purification step.

[0136] An “antigenic region” or “antigenic determinant” or an “epitope” includes any protein determinant capable of specific binding to an antibody. This is the site on an antigen to which each distinct antibody molecule binds. Epitopic determinants usually consist of active surface groupings of molecules such as amino acids or sugar side chains and usually have specific three-dimensional structural characteristics, as well as charge characteristics.

[0137] “Antibody specificity,” is an antibody, which has a stronger binding affinity for an antigen from a first subject species than it has for a homologue of that antigen from a second subject species. Normally, the antibody “bind specifically” to a human antigen (i.e., has a binding affinity (Kd) value of no more than about 1×10⁻⁷ M, preferably no more than about 1×10⁻⁸ M and most preferably no more than about 1×10⁻⁹ M) but has a binding affinity for a homologue of the antigen from a second subject species which is at least about 50 fold, or at least about 500 fold, or at least about 1000 fold, weaker than its binding affinity for the human antigen. The antibody can be of any of the various types of antibodies as defined above, but preferably is a humanized or human antibody (Queen et al., U.S. Pat. Nos. 5,530,101, 5,585,089; 5,693,762; and 6,180,370).

[0138] The present invention provides an “antibody variant,” which refers to an amino acid sequence variant of an antibody wherein one or more of the amino acid residues have been modified. Such variant necessarily have less than 100% sequence identity or similarity with the amino acid sequence having at least 75% amino acid sequence identity or similarity with the amino acid sequence of either the heavy or light chain variable domain of the antibody, more preferably at least 80%, more preferably at least 85%, more preferably at least 90%, and most preferably at least 95%. Since the method of the invention applies equally to both polypeptides, antibodies and fragments thereof, these terms are sometimes employed interchangeably.

[0139] The term “variable” in the context of variable domain of antibodies refers to the fact that certain portions of the variable domains differ extensively in sequence among antibodies and are used in the binding and specificity of each particular antibody for its particular antigen. However, the variability is not evenly distributed through the variable domains of antibodies. It is concentrated in three segments called complementarity determining regions (CDRs) also known as hypervariable regions both in the light chain and the heavy chain variable domains. There are at least two techniques for determining CDRs: (1) an approach based on cross-species sequence variability (i.e., Kabat et al., Sequences of Proteins of Immunological Interest (National Institute of Health, Bethesda, Md. 1987); and (2) an approach based on crystallographic studies of antigen-antibody complexes (Chothia, C. et al. (1989), Nature 342: 877). The more highly conserved portions of variable domains are called the framework (FR). The variable domains of native heavy and light chains each comprise four FR regions, largely adopting a β-Sheet configuration, connected by three CDRs, which form loops connecting, and in some cases forming part of, the β-sheet structure. The CDRs in each chain are held together in close proximity by the FR regions and, with the CDRs from the other chain, contribute to the formation of the antigen-binding site of antibodies (see Kabat et al.) The constant domains are not involved directly in binding an antibody to an antigen, but exhibit various effector functions, such as participation of the antibody in antibody-dependent cellular toxicity.

[0140] The term “antibody fragment” refers to a portion of a full-length antibody, generally the antigen binding or variable region. Examples of antibody fragments include Fab, Fab′, F(ab′)₂ and Fv fragments. Papain digestion of antibodies produces two identical antigen binding fragments, called the Fab fragment, each with a single antigen binding site, and a residual “Fc” fragment, so-called for its ability to crystallize readily. Pepsin treatment yields an F(ab′)₂ fragment that has two antigen binding fragments which are capable of crosslinking antigen, and a residual other fragment (which is termed pFc′). Additional fragments can include diabodies, linear antibodies, single-chain antibody molecules, and multispecific antibodies formed from antibody fragments. As used herein, “functional fragment” with respect to antibodies, refers to Fv, F(ab) and F(ab′)₂ fragments.

[0141] An “Fv” fragment is the minimum antibody fragment that contains a complete antigen recognition and binding site. This region consists of a dimer of one heavy and one light chain variable domain in a tight, non-covalent association (V_{H}-V_{L} dimer). It is in this configuration that the three CDRs of each variable domain interact to define an antigen-binding site on the surface of the V_{H}-V_{L} dimer. Collectively, the six CDRs confer antigen-binding specificity to the antibody. However, even a single variable domain (or half of an Fv comprising only three CDRs specific for an antigen) has the ability to recognize and bind antigen, although at a lower affinity than the entire binding site.

[0142] The Fab fragment [also designated as F(ab)] also contains the constant domain of the light chain and the first constant domain (CH1) of the heavy chain. Fab′ fragments differ from Fab fragments by the addition of a few residues at the carboxyl terminus of the heavy chain CH1 domain including one or more cysteines from the antibody hinge region. Fab′-SH is the designation herein for Fab′ in which the cysteine residue(s) of the constant domains have a free thiol group. F(ab′) fragments are produced by cleavage of the disulfide bond at the hinge cysteines of the F(ab′)₂ pepsin digestion product. Additional chemical couplings of antibody fragments are known to those of ordinary skill in the art.

[0143] The present invention further provides monoclonal antibodies, polyclonal antibodies as well as humanized antibody. In general, to generate antibodies, an isolated peptide is used as an immunogen and is administered to a mammalian organism, such as a rat, rabbit or mouse. The full-length protein, an antigenic peptide fragment or a fusion protein of the PCAT protein can be used. Particularly important fragments are those covering functional domains, some but not all the examples of the domains are identified in Tables. Many methods are known for generating and/or identifying antibodies to a given target peptide. Several such methods are described by Harlow, Antibodies, Cold Spring Harbor Press, (1989).

[0144] The term “monoclonal antibody” as used herein refers to an antibody obtained from a population of substantially homogeneous antibodies, i.e., the individual antibodies comprising the population are identical except for possible naturally occurring mutations that may be present in minor amounts. Monoclonal antibodies are highly specific, being directed against a single antigenic site. Furthermore, in contrast to conventional (polyclonal) antibody preparations which typically include different antibodies directed against different determinants (epitopes), each monoclonal antibody is directed against a single determinant on the antigen. In additional to their specificity, the monoclonal antibodies are advantageous in that they are synthesized by the hybridoma culture, uncontaminated by other immunoglobulins. The modifier “monoclonal” antibody indicates the character of the antibody as being obtained from a substantially homogeneous population of antibodies, and is not to be construed as requiring production of the antibody by any particular method. For example, the monoclonal antibodies to be used in accordance with the present invention may be made by the hybridoma method first described by Kohler and Milstein, Nature 256, 495 (1975), or may be made by recombinant methods, e.g., as described in U.S. Pat. No. 4,816,567. The monoclonal antibodies for use with the present invention may also be isolated from phage antibody libraries using the techniques described in Clackson et al., Nature 352: 624-628 (1991), as well as in Marks et al., J. Mol. Biol. 222: 581-597 (1991). For detailed procedures for making a monoclonal antibody, see the Example below.

[0145] “Humanized” forms of non-human (e.g. murine or rabbit) antibodies are chimeric immunoglobulins, immunoglobulin chains or fragments thereof (such as Fv, Fab, Fab′, F(ab′).sub.2 or other antigen-binding subsequences of antibodies) which contain minimal sequence derived from non-human immunoglobulin. For the most part, humanized antibodies are human immunoglobulins (recipient antibody) in which residues from a complementary determining region (CDR) of the recipient are replaced by residues from a CDR of a non-human species (donor antibody) such as mouse, rat or rabbit having the desired specificity, affinity and capacity. In some instances, Fv framework residues of the human immunoglobulin are replaced by corresponding non-human residues. Furthermore, humanized antibody may comprise residues, which are found neither in the recipient antibody nor in the imported CDR or framework sequences. These modifications are made to further refine and optimize antibody performance. In general, the humanized antibody will comprise substantially all of at least one, and typically two, variable domains, in which all or substantially all of the CDR regions correspond to those of a non-human immunoglobulin and all or substantially all of the FR regions are those of a human immunoglobulin consensus sequence. The humanized antibody optimally also will comprise at least a portion of an immunoglobulin constant region (Fc), typically that of a human immunoglobulin. For further details, see: Jones et al., Nature 321, 522-525 (1986); Reichmann et al., Nature 332, 323-327 (1988) and Presta, Curr. Op. Struct. Biol. 2, 593-596 (1992).

[0146] Polyclonal antibodies may be prepared by any known method or modifications of these methods including obtaining antibodies from patients. For example, a complex of an immunogen such as PCAT proteins, peptides or fragments thereof and a carrier protein is prepared and an animal is immunized by the complex according to the same manner as that described with respect to the above monoclonal antibody preparation and the description in the Example. A serum or plasma containing the antibody against the protein is recovered from the immunized animal and the antibody is separated and purified. The gamma globulin fraction or the IgG antibodies can be obtained, for example, by use of saturated ammonium sulfate or DEAE Sephadex, or other techniques known to those skilled in the art.

[0147] The antibody titer in the antiserum can be measured according to the same manner as that described above with respect to the supernatant of the hybridoma culture. Separation and purification of the antibody can be carried out according to the same separation and purification method of antibody as that described with respect to the above monoclonal antibody and in the Example.

[0148] The protein used herein as the immunogen is not limited to any particular type of immunogen. In one aspect, antibodies are preferably prepared from regions or discrete fragments of the PCAT proteins. Antibodies can be prepared from any region of the peptide as described herein. In particular, they are selected from a group consisting of SEQ ID NOS: 703-873 and fragments of SEQ ID NOS: 1-288. An antigenic fragment will typically comprise at least 8 contiguous amino acid residues. The antigenic peptide can comprise, however, at least 10, 12, 14, 16 or more amino acid residues. Such fragments can be selected on a physical property, such as fragments correspond to regions that are located on the surface of the protein, e.g., hydrophilic regions or can be selected based on sequence uniqueness.

[0149] Antibodies may also be produced by inducing production in the lymphocyte population or by screening antibody libraries or panels of highly specific binding reagents as disclosed in Orlandi et al. (1989; Proc Natl Acad Sci 86:3833-3837) or Winter et al. (1991; Nature 349:293-299). A protein may be used in screening assays of phagemid or B-lymphocyte immunoglobulin libraries to identify antibodies having a desired specificity. Numerous protocols for competitive binding or immunoassays using either polyclonal or monoclonal antibodies with established specificities are well known in the art. Smith G. P., 1991, Curr. Opin. Biotechnol. 2: 668-673.

[0150] The antibodies of the present invention can also be generated using various phage display methods known in the art. In phage display methods, functional antibody domains are displayed on the surface of phage particles which carry the polynucleotide sequences encoding them. In a particular, such phage can be utilized to display antigen-binding domains expressed from a repertoire or combinatorial antibody library (e.g., human or murine). Phage expressing an antigen binding domain that binds the antigen of interest can be selected or identified with antigen, e.g., using labeled antigen or antigen bound or captured to a solid surface or bead. Phage used in these methods are typically filamentous phage including fd and M13 binding domains expressed from phage with Fab, Fv or disulfide stabilized Fv antibody domains recombinantly fused to either the phage gene III or gene VIII protein. Examples of phage display methods that can be used to make the antibodies of the present invention include those disclosed in Brinkman et al., J. Immunol. Methods 182:41-50 (1995); Ames et al., J. Immunol. Methods 184:177-186 (1995); Kettleborough et al., Eur. J. Immunol. 24:952-958 (1994); Persic et al., Gene 187 9-18 (1997); Burton et al., Advances in Immunology 57:191-280 (1994); PCT application No. PCT/GB91/01134; PCT publications WO 90/02809; WO 91/10737; WO 92/01047; WO 92/18619; WO 93/11236; WO 95/15982; WO 95/20401; and U.S. Pat. Nos. 5,698,426; 5,223,409; 5,403,484; 5,580,717; 5,427,908; 5,750,753; 5,821,047; 5,571,698; 5,427,908; 5,516,637; 5,780,225; 5,658,727; 5,733,743 and 5,969,108; each of which is incorporated herein by reference in its entirety.

[0151] Antibody can be also made recombinantly. When using recombinant techniques, the antibody variant can be produced intracellularly, in the periplasmic space, or directly secreted into the medium. If the antibody variant is produced intracellularly, as a first step, the particulate debris, either host cells or lysed fragments, is removed, for example, by centrifugation or ultrafiltration. Carter et al., Bio/Technology 10: 163-167 (1992) describe a procedure for isolating antibodies which are secreted to the periplasmic space of E. coli. Briefly, cell paste is thawed in the presence of sodium acetate (pH 3.5), EDTA, and phenylmethylsulfonylfluoride (PMSF) over about 30 minutes. Cell debris can be removed by centrifugation. Where the antibody variant is secreted into the medium, supernatants from such expression systems are generally first concentrated using a commercially available protein concentration filter, for example, an Amicon or Millipore Pellicon ultrafiltration unit. A protease inhibitor such as PMSF may be included in any of the foregoing steps to inhibit proteolysis and antibiotics may be included to prevent the growth of adventitious contaminants.

[0152] The antibodies or antigen binding fragments may also be produced by genetic engineering. The technology for expression of both heavy and light cain genes in E. coli is the subject the following PCT patent applications; publication number WO 901443, WO901443, and WO 9014424 and in Huse et al., 1989 Science 246:1275-1281. The general recombinant methods are well known in the art.

[0153] The antibody composition prepared from the cells can be purified using, for example, hydroxylapatite chromatography, gel electrophoresis, dialysis, and affinity chromatography, with affinity chromatography being the preferred purification technique. The suitability of protein A as an affinity ligand depends on the species and isotype of any immunoglobulin Fc domain that is present in the antibody. Protein A can be used to purify antibodies that are based on human .delta.1, .delta.2 or .delta.4 heavy chains (Lindmark et al., J. Immunol Meth. 62: 1-13 (1983)). Protein G is recommended for all mouse isotypes and for human .delta.3 (Guss et al., EMBO J. 5: 1567-1575 (1986)). The matrix to which the affinity ligand is attached is most often agarose, but other matrices are available. Mechanically stable matrices such as controlled pore glass or poly(styrenedivinyl)benzene allow for faster flow rates and shorter processing times than can be achieved with agarose. Where the antibody comprises a CH3 domain, the Bakerbond ABX™ resin (J.T. Baker, Phillipsburg, N.J.) is useful for purification. Other techniques for protein purification such as fractionation on an ion-exchange column, ethanol precipitation, Reverse Phase HPLC, chromatography on silica, chromatography on heparin SEPHAROSE™ chromatography on an anion or cation exchange resin (such as a polyaspartic acid column), chromatofocusing, SDS-PAGE, and ammonium sulfate precipitation are also available depending on the antibody to be recovered.

[0154] Following any preliminary purification step(s), the mixture comprising the antibody of interest and contaminants may be subjected to low pH hydrophobic interaction chromatography using an elution buffer at a pH between about 2.5-4.5, preferably performed at low salt concentrations (e.g., from about 0-0.25M salt).

### Antibody Uses

[0155] The antibodies can be used to isolate one of the proteins of the present invention by standard techniques, such as affinity chromatography or immunoprecipitation. The antibodies can facilitate the purification of the natural protein from cells and recombinantly produced protein expressed in host cells. In addition, such antibodies are useful to detect the presence of one of the proteins of the present invention in cells or tissues to determine the pattern of expression of the protein among various tissues in an organism and over the course of normal development. Experimental data as provided in Table 1 indicate that the PCATs of the present invention are expressed at differential level in various pancreatic cell lines, for example SEQ ID NOS: 1-119 are overexpressed in all tested cell lines, whereas other proteins or peptides are underexpressed in selected cell lines. In one example, protein (SEQ ID NO: 120) or peptide (SEQ ID NO: 761) is overexpressed in one cell line (HPAC), yet underexpressed in another cell line (Su.86.86). Further, such antibodies can be used to detect protein in situ, in vitro, or in a cell lysate or supernatant in order to evaluate the abundance and pattern of expression. Also, such antibodies can be used to assess abnormal tissue distribution or abnormal expression during development or progression of a biological condition. Antibody detection of circulating fragments of the full length protein can be used to identify turnover.

[0156] Further, the antibodies can be used to assess expression in disease states such as in active stages of the disease or in an individual with a predisposition toward disease related to the protein's function. When a disorder is caused by an inappropriate tissue distribution, developmental expression, level of expression of the protein, or expressed/processed form, the antibody can be prepared against the normal protein. Experimental data as provided in Table 1 indicates expression in human pancreatic cell lines. If a disorder is characterized by a specific mutation in the protein, antibodies specific for this mutant protein can be used to assay for the presence of the specific mutant protein.

[0157] The antibodies can also be used to assess normal and aberrant subcellular localization of cells in the various tissues in an organism. Experimental data as provided in Table 1 indicates expression in human pancreatic cell lines. The diagnostic uses can be applied, not only in genetic testing, but also in monitoring a treatment modality. Accordingly, where treatment is ultimately aimed at correcting expression level or the presence of aberrant sequence and aberrant tissue distribution or developmental expression, antibodies directed against the protein or relevant fragments can be used to monitor therapeutic efficacy. More detection and diagnostic methods are described in detail below.

[0158] Additionally, antibodies are useful in pharmacogenomic analysis. Thus, antibodies prepared against polymorphic proteins can be used to identify individuals that require modified treatment modalities. The antibodies are also useful as diagnostic tools, as an immunological marker for aberrant protein analyzed by electrophoretic mobility, isoelectric point, tryptic peptide digest, and other physical assays known to those in the art.

[0159] The antibodies are also useful for tissue typing. Experimental data as provided in Table 1 indicates expression in human pancreatic cell lines. Thus, where a specific protein has been correlated with expression in a specific tissue, antibodies that are specific for this protein can be used to identify a tissue type.

[0160] The antibodies are also useful for inhibiting protein function, for example, blocking the binding of the PCAT peptide to a binding partner such as a substrate or another antibody binding to the PCAT. These uses can also be applied in a therapeutic context in which treatment involves inhibiting the protein's function. An antibody can be used, for example, to block binding, thus modulating (agonizing or antagonizing) the peptides activity. Antibodies can be prepared against specific fragments containing sites required for function or against intact protein that is associated with a cell or cell membrane. More therapeutics methods are decried in detail below.

[0161] The invention also encompasses kits for using antibodies to detect the presence of a protein in a biological sample. The kit can comprise antibodies such as a labeled or labelable antibody and a compound or agent for detecting protein in a biological sample; means for determining the amount of protein in the sample; means for comparing the amount of protein in the sample with a standard; and instructions for use. Such a kit can be supplied to detect a single protein or epitope or can be configured to detect one of a multitude of epitopes, such as in an antibody detection array. Arrays are described in detail below for nucleic acid arrays and similar methods have been developed for antibody arrays.

### Nucleic Acid Molecules

[0162] The present invention further provides isolated nucleic acid molecules that encode a PCAT peptide or protein of the present invention. Such nucleic acid molecules will consist of, consist essentially of, or comprise a nucleotide sequence that encodes one of the PCAT peptides of the present invention, an allelic variant thereof, or an ortholog or paralog thereof. The nucleic acid molecules and the fragments thereof of the present invention pertains, however, are not to be construed as encompassing fragments that may be disclosed publicly prior to the present invention.

[0163] As used herein, an “isolated” nucleic acid molecule is one that is separated from other nucleic acid present in the natural source of the nucleic acid. Preferably, an “isolated” nucleic acid is free of sequences which naturally flank the nucleic acid (i.e., sequences located at the 5′ and 3′ ends of the nucleic acid) in the genomic DNA of the organism from which the nucleic acid is derived. However, there can be some flanking nucleotide sequences, for example up to about 5 KB, 4 KB, 3 KB, 2 KB, or 1 KB or less, particularly contiguous peptide encoding sequences and peptide encoding sequences within the same gene but separated by introns in the genomic sequence. The important point is that the nucleic acid is isolated from remote and unimportant flanking sequences such that it can be subjected to the specific manipulations described herein such as recombinant expression, preparation of probes and primers, and other uses specific to the nucleic acid sequences.

[0164] Moreover, an “isolated” nucleic acid molecule, such as a transcript/cDNA molecule, can be substantially free of other cellular material, or culture medium when produced by recombinant techniques, or chemical precursors or other chemicals when chemically synthesized. However, the nucleic acid molecule can be fused to other coding or regulatory sequences and still be considered isolated.

[0165] For example, recombinant DNA molecules contained in a vector are considered isolated. Further examples of isolated DNA molecules include recombinant DNA molecules maintained in heterologous host cells or purified (partially or substantially) DNA molecules in solution. Isolated RNA molecules include in vivo or in vitro RNA transcripts of the isolated DNA molecules of the present invention. Isolated nucleic acid molecules according to the present invention further include such molecules produced synthetically.

[0166] The present invention further provides nucleic acid molecules that comprise the nucleotide sequences shown in Table 2, (SEQ ID NOS: 289-702), or any nucleic acid molecule that encodes the protein provided in Table 2, (SEQ ID NOS: 1-288). A nucleic acid molecule comprises a nucleotide sequence when the nucleotide sequence is at least part of the final nucleotide sequence of the nucleic acid molecule. In such a fashion, the nucleic acid molecule can be only the nucleotide sequence or have additional nucleic acid residues, such as nucleic acid residues that are naturally associated with it or heterologous nucleotide sequences. Such a nucleic acid molecule can have a few additional nucleotides or can comprise several hundred or more additional nucleotides. A brief description of how various types of these nucleic acid molecules can be readily made/isolated is provided below.

[0167] In Table 2, human transcript sequences are provided. As discussed below, some of the non-coding regions, particularly gene regulatory elements such as promoters, are useful for a variety of purposes, e.g. control of heterologous gene expression, target for identifying gene activity modulating compounds, and are particularly claimed as fragments of the genomic sequence provided herein.

[0168] The isolated nucleic acid molecules can encode the mature protein plus additional amino or carboxyl-terminal amino acids, or amino acids interior to the mature peptide (when the mature form has more than one peptide chain, for instance). Such sequences may play a role in processing of a protein from precursor to a mature form, facilitate protein trafficking, prolong or shorten protein half-life or facilitate manipulation of a protein for assay or production, among other things. As generally is the case in situ, the additional amino acids may be processed away from the mature protein by cellular enzymes.

[0169] As mentioned above, the isolated nucleic acid molecules include, but are not limited to, the sequence encoding the PCAT peptide alone, the sequence encoding the mature peptide and additional coding sequences, such as a leader or secretory sequence (e.g., a pre-pro or pro-protein sequence), the sequence encoding the mature peptide, with or without the additional coding sequences, plus additional non-coding sequences, for example introns and non-coding 5′ and 3′ sequences such as transcribed but non-translated sequences that play a role in transcription, mRNA processing (including splicing and polyadenylation signals), ribosome binding and stability of mRNA. In addition, the nucleic acid molecule may be fused to a marker sequence encoding, for example, a peptide that facilitates purification.

[0170] Isolated nucleic acid molecules can be in the form of RNA, such as mRNA, or in the form DNA, including cDNA and genomic DNA obtained by cloning or produced by chemical synthetic techniques or by a combination thereof. The nucleic acid, especially DNA, can be double-stranded or single-stranded. Single-stranded nucleic acid can be the coding strand (sense strand) or the non-coding strand (anti-sense strand).

[0171] The invention further provides nucleic acid molecules that encode fragments of the peptides of the present invention as well as nucleic acid molecules that encode obvious variants of the PCAT proteins of the present invention that are described above. Such nucleic acid molecules may be naturally occurring, such as allelic variants (same locus), paralogs (different locus), and orthologs (different organism), or may be constructed by recombinant DNA methods or by chemical synthesis. Such non-naturally occurring variants may be made by mutagenesis techniques, including those applied to nucleic acid molecules, cells, or organisms. Accordingly, as discussed above, the variants can contain nucleotide substitutions, deletions, inversions and insertions. Variation can occur in either or both the coding and non-coding regions. The variations can produce both conservative and non-conservative amino acid substitutions.

[0172] The present invention further provides non-coding fragments of the nucleic acid molecules provided in Tables 1 and 2. Preferred non-coding fragments include, but are not limited to, promoter sequences, enhancer sequences, gene modulating sequences and gene termination sequences. Such fragments are useful in controlling heterologous gene expression and in developing screens to identify gene-modulating agents. A promoter can readily be identified as being 5′ to the ATG start site in the genomic sequence.

[0173] A fragment comprises a contiguous nucleotide sequence greater than 12 or more nucleotides. Further, a fragment could at least 30, 40, 50, 100, 250 or 500 nucleotides in length. The length of the fragment will be based on its intended use. For example, the fragment can encode epitope bearing regions of the peptide, or can be useful as DNA probes and primers. Such fragments can be isolated using the known nucleotide sequence to synthesize an oligonucleotide probe. A labeled probe can then be used to screen a cDNA library, genomic DNA library, or mRNA to isolate nucleic acid corresponding to the coding region. Further, primers can be used in PCR reactions to clone specific regions of the gene.

[0174] A probe/primer typically comprises substantially a purified oligonucleotide or oligonucleotide pair. The oligonucleotide typically comprises a region of nucleotide sequence that hybridizes under stringent conditions to at least about 12, 20, 25, 40, 50 or more consecutive nucleotides.

[0175] Orthologs, homologs, and allelic variants can be identified using methods well known in the art. As described in the Peptide Section, these variants comprise a nucleotide sequence encoding a peptide that is typically 60-70%, 70-80%, 80-90%, and more typically at least about 90-95% or more homologous to the nucleotide sequence shown in the Table 2 or a fragment of this sequence. Such nucleic acid molecules can readily be identified as being able to hybridize under moderate to stringent conditions, to the nucleotide sequence shown in the Figure sheets or a fragment of the sequence. Allelic variants can readily be determined by genetic locus of the encoding gene.

[0176] As used herein, the term “hybridizes under stringent conditions” is intended to describe conditions for hybridization and washing under which nucleotide sequences encoding a peptide at least 60-70% homologous to each other typically remain hybridized to each other. The conditions can be such that sequences at least about 60%, at least about 70%, or at least about 80% or more homologous to each other typically remain hybridized to each other. Such stringent conditions are known to those skilled in the art and can be found in Current Protocols in Molecular Biology, John Wiley & Sons, N.Y. (1989), 6.3.1-6.3.6. One example of stringent hybridization conditions is hybridization in 6× sodium chloride/sodium citrate (SSC) at about 45 C, followed by one or more washes in 0.2×SSC, 0.1% SDS at 50-65 C. Examples of moderate to low stringency hybridization conditions are well known in the art.

### Nucleic Acid Molecule Uses

[0177] The nucleic acid molecules of the present invention are useful for probes, primers, chemical intermediates, and in biological assays. The nucleic acid molecules are useful as a hybridization probe for messenger RNA, transcript/cDNA and genomic DNA to isolate full-length cDNA and genomic clones encoding the peptide described in Tables 1 and 2 and to isolate cDNA and genomic clones that correspond to variants (alleles, orthologs, etc.) producing the same or related peptides shown in Tables 1 and 2.

[0178] The probe can correspond to any sequence along the entire length of the nucleic acid molecules provided in the Tables. Accordingly, it could be derived from 5′ noncoding regions, the coding region, and 3′ noncoding regions. However, as discussed, fragments are not to be construed as encompassing fragments disclosed prior to the present invention.

[0179] The nucleic acid molecules are also useful as primers for PCR to amplify any given region of a nucleic acid molecule and are useful to synthesize antisense molecules of desired length and sequence.

[0180] The nucleic acid molecules are also useful for constructing recombinant vectors. Such vectors include expression vectors that express a portion of, or all of, the peptide sequences. Vectors also include insertion vectors, used to integrate into another nucleic acid molecule sequence, such as into the cellular genome, to alter in situ expression of a gene and/or gene product. For example, an endogenous coding sequence can be replaced via homologous recombination with all or part of the coding region containing one or more specifically introduced mutations.

[0181] The nucleic acid molecules are also useful for expressing antigenic portions of the proteins.

[0182] The nucleic acid molecules are also useful as probes for determining the chromosomal positions of the nucleic acid molecules by means of in situ hybridization methods.

[0183] The nucleic acid molecules are also useful in making vectors containing the gene regulatory regions of the nucleic acid molecules of the present invention.

[0184] The nucleic acid molecules are also useful for designing ribozymes corresponding to all, or a part, of the mRNA produced from the nucleic acid molecules described herein.

The nucleic acid molecules are also useful for making vectors that express part, or all, of the peptides.

[0185] The nucleic acid molecules are also useful for constructing host cells expressing a part, or all, of the nucleic acid molecules and peptides.

[0186] The nucleic acid molecules are also useful for constructing transgenic animals expressing all, or a part, of the nucleic acid molecules and peptides.

[0187] The nucleic acid molecules are also useful as hybridization probes for determining the presence, level, form and distribution of nucleic acid expression. Experimental data as provided in Table 1 indicate that the PCATs of the present invention are expressed at differential level in various pancreatic cell lines, for example SEQ ID NOS: 1-119 are overexpressed in all tested cell lines, whereas other proteins or peptides are underexpressed in selected cell lines. In one example, protein (SEQ ID NO: 120) or peptide (SEQ ID NO: 761) is overexpressed in one cell line (HPAC), yet underexpressed in another cell line (Su.86.86). Accordingly, the probes can be used to detect the presence of, or to determine levels of, a specific nucleic acid molecule in cells, tissues, and in organisms. The nucleic acid whose level is determined can be DNA or RNA. Accordingly, probes corresponding to the peptides described herein can be used to assess expression and/or gene copy number in a given cell, tissue, or organism. These uses are relevant for diagnosis of disorders involving an increase or decrease in PCAT protein expression relative to normal results.

[0188] In vitro techniques for detection of mRNA include Northern hybridizations and in situ hybridizations. In vitro techniques for detecting DNA include Southern hybridizations and in situ hybridization.

[0189] Probes can be used as a part of a diagnostic test kit for identifying cells or tissues that express a PCAT protein, such as by measuring a level of a PCAT-encoding nucleic acid in a sample of cells from a subject e.g., mRNA or genomic DNA, or determining if a PCAT gene has been mutated. Experimental data as provided in Table 1 indicate that the PCATs of the present invention are expressed at differential level in various pancreatic cell lines, for example SEQ ID NOS: 1-119 are overexpressed in all tested cell lines, whereas other proteins or peptides are underexpressed in selected cell lines. In one example, protein (SEQ ID NO: 120) or peptide (SEQ ID NO: 761) is overexpressed in one cell line (HPAC), yet underexpressed in another cell line (Su.86.86). More detection and diagnostic methods are described in detail below.

[0190] Nucleic acid expression assays are useful for drug screening to identify compounds that modulate PCAT nucleic acid expression.

[0191] The invention thus provides a method for identifying a compound that can be used to treat a disorder associated with nucleic acid expression of the PCAT gene, particularly biological and pathological processes that are mediated by the PCAT in cells and tissues that express it. Experimental data as provided in Table 1 indicates expression in human pancreatic cell lines. The method typically includes assaying the ability of the compound to modulate the expression of the PCAT nucleic acid and thus identifying a compound that can be used to treat a disorder characterized by undesired PCAT nucleic acid expression. The assays can be performed in cell-based and cell-free systems. Cell-based assays include cells naturally expressing the PCAT nucleic acid or recombinant cells genetically engineered to express specific nucleic acid sequences.

[0192] The assay for PCAT nucleic acid expression can involve direct assay of nucleic acid levels, such as mRNA levels, or on collateral compounds involved in the signal pathway. Further, the expression of genes that are up- or down-regulated in response to the PCAT protein signal pathway can also be assayed. In this embodiment the regulatory regions of these genes can be operably linked to a reporter gene such as luciferase.

[0193] Thus, modulators of PCAT gene expression can be identified in a method wherein a cell is contacted with a candidate compound or agent and the expression of mRNA determined. The level of expression of PCAT mRNA in the presence of the candidate compound or agent is compared to the level of expression of PCAT mRNA in the absence of the candidate compound or agent. The candidate compound can then be identified as a modulator of nucleic acid expression based on this comparison and be used, for example to treat a disorder characterized by aberrant nucleic acid expression. When expression of mRNA is statistically significantly greater in the presence of the candidate compound than in its absence, the candidate compound is identified as a stimulator of nucleic acid expression. When nucleic acid expression is statistically significantly less in the presence of the candidate compound than in its absence, the candidate compound is identified as an inhibitor of nucleic acid expression.

[0194] The invention further provides methods of treatment, with the nucleic acid as a target, using a compound or an agent identified through drug screening as a gene modulator to modulate PCAT nucleic acid expression in cells and tissues that express the PCAT. Experimental data as provided in Table 1 indicate that the PCATs of the present invention are expressed at differential level in various pancreatic cell lines, for example SEQ ID NOS: 1-119 are overexpressed in all tested cell lines, whereas other proteins or peptides are underexpressed in selected cell lines. In one example, protein (SEQ ID NO: 120) or peptide (SEQ ID NO: 761) is overexpressed in one cell line (HPAC), yet underexpressed in another cell line (Su.86.86). Modulation includes both up-regulation (i.e. activation or agonization) or down-regulation (suppression or antagonization) or nucleic acid expression.

[0195] Alternatively, a modulator for nucleic acid expression can be a small molecule or drug identified using the screening assays described herein as long as the drug or small molecule inhibits the PCAT nucleic acid expression in the cells and tissues that express the protein. Experimental data as provided in Table 1 indicates expression in human pancreatic cell lines.

[0196] The nucleic acid molecules are also useful for monitoring the effectiveness of modulating compounds or agents on the expression or activity of the PCAT gene in clinical trials or in a treatment regimen. Thus, the gene expression pattern can serve as a barometer for the continuing effectiveness of treatment with the compound, particularly with compounds to which a patient can develop resistance. The gene expression pattern can also serve as a marker indicative of a physiological response of the affected cells to the compound. Accordingly, such monitoring would allow either increased administration of the compound or the administration of alternative compounds to which the patient has not become resistant. Similarly, if the level of nucleic acid expression falls below a desirable level, administration of the compound could be commensurately decreased.

[0197] The nucleic acid molecules are also useful in diagnostic assays for qualitative changes in PCAT nucleic acid expression, and particularly in qualitative changes that lead to pathology. The nucleic acid molecules can be used to detect mutations in PCAT genes and gene expression products such as mRNA. The nucleic acid molecules can be used as hybridization probes to detect naturally occurring genetic mutations in the PCAT gene and thereby to determine whether a subject with the mutation is at risk for a disorder caused by the mutation. Mutations include deletion, addition, or substitution of one or more nucleotides in the gene, chromosomal rearrangement, such as inversion or transposition, modification of genomic DNA, such as aberrant methylation patterns or changes in gene copy number, such as amplification. Detection of a mutated form of the PCAT gene associated with a dysfunction provides a diagnostic tool for an active disease or susceptibility to disease when the disease results from overexpression, underexpression, or altered expression of a PCAT protein.

[0198] Individuals carrying mutations in the PCAT gene can be detected at the nucleic acid level by a variety of techniques. Genomic DNA can be analyzed directly or can be amplified by using PCR prior to analysis. RNA or cDNA can be used in the same way. In some uses, detection of the mutation involves the use of a probe/primer in a polymerase chain reaction (PCR) (see, e.g. U.S. Pat. Nos. 4,683,195 and 4,683,202), such as anchor PCR or RACE PCR, or, alternatively, in a ligation chain reaction (LCR) (see, e.g., Landegran et al., Science 241:1077-1080 (1988); and Nakazawa et al., PNAS 91:360-364 (1994)), the latter of which can be particularly useful for detecting point mutations in the gene (see Abravaya et al., Nucleic Acids Res. 23:675-682 (1995)). This method can include the steps of collecting a sample of cells from a patient, isolating nucleic acid (e.g., genomic, mRNA or both) from the cells of the sample, contacting the nucleic acid sample with one or more primers which specifically hybridize to a gene under conditions such that hybridization and amplification of the gene (if present) occurs, and detecting the presence or absence of an amplification product, or detecting the size of the amplification product and comparing the length to a control sample. Deletions and insertions can be detected by a change in size of the amplified product compared to the normal genotype. Point mutations can be identified by hybridizing amplified DNA to normal RNA or antisense DNA sequences.

[0199] Alternatively, mutations in a PCAT gene can be directly identified, for example, by alterations in restriction enzyme digestion patterns determined by gel electrophoresis.

[0200] Further, sequence-specific ribozymes (U.S. Pat. No. 5,498,531) can be used to score for the presence of specific mutations by development or loss of a ribozyme cleavage site. Perfectly matched sequences can be distinguished from mismatched sequences by nuclease cleavage digestion assays or by differences in melting temperature.

[0201] Sequence changes at specific locations can also be assessed by nuclease protection assays such as RNase and S1 protection or the chemical cleavage method. Furthermore, sequence differences between a mutant PCAT gene and a wild-type gene can be determined by direct DNA sequencing. A variety of automated sequencing procedures can be utilized when performing the diagnostic assays (Naeve, C. W., (1995) Biotechniques 19:448), including sequencing by mass spectrometry (see, e.g., PCT International Publication No. WO 94/16101; Cohen et al., Adv. Chromatogr. 36:127-162 (1996); and Griffin et al., Appl. Biochem. Biotechnol. 38:147-159 (1993)).

[0202] Other methods for detecting mutations in the gene include methods in which protection from cleavage agents is used to detect mismatched bases in RNA/RNA or RNA/DNA duplexes (Myers et al., Science 230:1242 (1985)); Cotton et al., PNAS 85:4397 (1988); Saleeba et al., Meth. Enzymol. 217:286-295 (1992)), electrophoretic mobility of mutant and wild type nucleic acid is compared (Orita et al., PNAS 86:2766 (1989); Cotton et al., Mutat. Res. 285:125-144 (1993); and Hayashi et al., Genet. Anal. Tech. Appl. 9:73-79 (1992)), and movement of mutant or wild-type fragments in polyacrylamide gels containing a gradient of denaturant is assayed using denaturing gradient gel electrophoresis (Myers et al., Nature 313:495 (1985)). Examples of other techniques for detecting point mutations include selective oligonucleotide hybridization, selective amplification, and selective primer extension.

[0203] The nucleic acid molecules are also useful for testing an individual for a genotype that while not necessarily causing the disease, nevertheless affects the treatment modality. Thus, the nucleic acid molecules can be used to study the relationship between an individual's genotype and the individual's response to a compound used for treatment (pharmacogenomic relationship). Accordingly, the nucleic acid molecules described herein can be used to assess the mutation content of the PCAT gene in an individual in order to select an appropriate compound or dosage regimen for treatment.

[0204] Thus nucleic acid molecules displaying genetic variations that affect treatment provide a diagnostic target that can be used to tailor treatment in an individual. Accordingly, the production of recombinant cells and animals containing these polymorphisms allow effective clinical design of treatment compounds and dosage regimens.

[0205] The nucleic acid molecules are thus useful as antisense constructs to control PCAT gene expression in cells, tissues, and organisms. A DNA antisense nucleic acid molecule is designed to be complementary to a region of the gene involved in transcription, preventing transcription and hence production of PCAT protein. An antisense RNA or DNA nucleic acid molecule would hybridize to the mRNA and thus block translation of mRNA into PCAT protein.

[0206] The nucleic acid of the present invention may also be used to specifically suppress gene expression by methods such as RNA interference (RNAi), which may also include cosuppression and quelling. This and antisense RNA or DNA of gene suppression are well known in the art. A review of this technique is found in Science 288:1370-1372, 2000. RNAi also operates on a post-transcriptional level and is sequence specific, but suppresses gene expression far more efficiently than antisense RNA. RNAi fragments, particularly double-stranded (ds) RNAi, can be also used to generate loss-of-function phenotypes.

[0207] Alternatively, a class of antisense molecules can be used to inactivate mRNA in order to decrease expression of PCAT nucleic acid. Accordingly, these molecules can treat a disorder characterized by abnormal or undesired PCAT nucleic acid expression. This technique involves cleavage by means of ribozymes containing nucleotide sequences complementary to one or more regions in the mRNA that attenuate the ability of the mRNA to be translated. Possible regions include coding regions and particularly coding regions corresponding to the catalytic and other functional activities of the PCAT protein, such as substrate binding.

[0208] The nucleic acid molecules also provide vectors for gene therapy in patients containing cells that are aberrant in PCAT gene expression. Thus, recombinant cells, which include the patient's cells that have been engineered ex vivo and returned to the patient, are introduced into an individual where the cells produce the desired PCAT protein to treat the individual.

[0209] The invention also encompasses kits for detecting the presence of a PCAT nucleic acid in a biological sample. Experimental data as provided in Table 1 indicate that the PCATs of the present invention are expressed at differential level in various pancreatic cell lines, for example SEQ ID NOS: 1-119 are overexpressed in all tested cell lines, whereas other proteins or peptides are underexpressed in selected cell lines. In one example, protein (SEQ ID NO: 120) or peptide (SEQ ID NO: 761) is overexpressed in one cell line (HPAC), yet underexpressed in another cell line (Su.86.86). For example, the kit can comprise reagents such as a labeled or labelable nucleic acid or agent capable of detecting PCAT nucleic acid in a biological sample; means for determining the amount of PCAT nucleic acid in the sample; and means for comparing the amount of PCAT nucleic acid in the sample with a standard. The compound or agent can be packaged in a suitable container. The kit can further comprise instructions for using the kit to detect PCAT protein mRNA or DNA.

### Vectors/Host Cells

[0210] The invention also provides vectors containing the nucleic acid molecules described herein. The term “vector” refers to a vehicle, preferably a nucleic acid molecule, which can transport the nucleic acid molecules. When the vector is a nucleic acid molecule, the nucleic acid molecules are covalently linked to the vector nucleic acid. With this aspect of the invention, the vector includes a plasmid, single or double stranded phage, a single or double stranded RNA or DNA viral vector, or artificial chromosome, such as a BAC, PAC, YAC, OR MAC.

[0211] A vector can be maintained in the host cell as an extrachromosomal element where it replicates and produces additional copies of the nucleic acid molecules. Alternatively, the vector may integrate into the host cell genome and produce additional copies of the nucleic acid molecules when the host cell replicates.

[0212] The invention provides vectors for the maintenance (cloning vectors) or vectors for expression (expression vectors) of the nucleic acid molecules. The vectors can function in prokaryotic or eukaryotic cells or in both (shuttle vectors).

[0213] Expression vectors contain cis-acting regulatory regions that are operably linked in the vector to the nucleic acid molecules such that transcription of the nucleic acid molecules is allowed in a host cell. The nucleic acid molecules can be introduced into the host cell with a separate nucleic acid molecule capable of affecting transcription. Thus, the second nucleic acid molecule may provide a trans-acting factor interacting with the cis-regulatory control region to allow transcription of the nucleic acid molecules from the vector. Alternatively, a trans-acting factor may be supplied by the host cell. Finally, a trans-acting factor can be produced from the vector itself. It is understood, however, that in some embodiments, transcription and/or translation of the nucleic acid molecules can occur in a cell-free system.

[0214] The regulatory sequences to which the nucleic acid molecules described herein can be operably linked include promoters for directing mRNA transcription. These include, but are not limited to, the left promoter from bacteriophage, the lac, TRP, and TAC promoters from E. coli, the early and late promoters from SV40, the CMV immediate early promoter, the adenovirus early and late promoters, and retrovirus long-terminal repeats.

[0215] In addition to control regions that promote transcription, expression vectors may also include regions that modulate transcription, such as repressor binding sites and enhancers. Examples include the SV40 enhancer, the cytomegalovirus immediate early enhancer, polyoma enhancer, adenovirus enhancers, and retrovirus LTR enhancers.

[0216] In addition to containing sites for transcription initiation and control, expression vectors can also contain sequences necessary for transcription termination and, in the transcribed region a ribosome binding site for translation. Other regulatory control elements for expression include initiation and termination codons as well as polyadenylation signals. The person of ordinary skill in the art would be aware of the numerous regulatory sequences that are useful in expression vectors. Such regulatory sequences are described, for example, in Sambrook et al., Molecular Cloning: A Laboratory Manual. 3rd. ed., Cold Spring Harbor Laboratory Press, Cold Spring Harbor, N.Y., (2001).

[0217] A variety of expression vectors can be used to express a nucleic acid molecule. Such vectors include chromosomal, episomal, and virus-derived vectors, for example vectors derived from bacterial plasmids, from bacteriophage, from yeast episomes, from yeast chromosomal elements, including yeast artificial chromosomes, from viruses such as baculoviruses, papovaviruses such as SV40, Vaccinia viruses, adenoviruses, poxviruses, pseudorabies viruses, and retroviruses. Vectors may also be derived from combinations of these sources such as those derived from plasmid and bacteriophage genetic elements, e.g. cosmids and phagemids. Appropriate cloning and expression vectors for prokaryotic and eukaryotic hosts are described in Sambrook et al., Molecular Cloning: A Laboratory Manual. 3rd. ed., Cold Spring Harbor Laboratory Press, Cold Spring Harbor, N.Y., (2001).

[0218] The regulatory sequence may provide constitutive expression in one or more host cells (i.e. tissue specific) or may provide for inducible expression in one or more cell types such as by temperature, nutrient additive, or exogenous factor such as a hormone or other ligand. A variety of vectors providing for constitutive and inducible expression in prokaryotic and eukaryotic hosts are well known to those of ordinary skill in the art.

[0219] The nucleic acid molecules can be inserted into the vector nucleic acid by well-known methodologies. Generally, the DNA sequence that will ultimately be expressed is joined to an expression vector by cleaving the DNA sequence and the expression vector with one or more restriction enzymes and then ligating the fragments together. Procedures for restriction enzyme digestion and ligation are well known to those of ordinary skill in the art.

[0220] The vector containing the appropriate nucleic acid molecule can be introduced into an appropriate host cell for propagation or expression using well-known techniques. Bacterial cells include, but are not limited to, E. coli, Streptomyces, and Salmonella typhimurium. Eukaryotic cells include, but are not limited to, yeast, insect cells such as Drosophila, animal cells such as COS and CHO cells, and plant cells.

[0221] As described herein, it may be desirable to express the peptide as a fusion protein. Accordingly, the invention provides fusion vectors that allow for the production of the peptides. Fusion vectors can increase the expression of a recombinant protein; increase the solubility of the recombinant protein, and aid in the purification of the protein by acting for example as a ligand for affinity purification. A proteolytic cleavage site may be introduced at the junction of the fusion moiety so that the desired peptide can ultimately be separated from the fusion moiety. Proteolytic enzymes include, but are not limited to, factor Xa, thrombin, and enteroenzyme. Typical fusion expression vectors include pGEX (Smith et al., Gene 67:31-40 (1988)), pMAL (New England Biolabs, Beverly, Mass.) and pRIT5 (Pharmacia, Piscataway, N.J.) which fuse glutathione S-transferase (GST), maltose E binding protein, or protein A, respectively, to the target recombinant protein. Examples of suitable inducible non-fusion E. coli expression vectors include pTrc (Amann et al., Gene 69:301-315 (1988)) and pET 11d (Studier et al., Gene Expression Technology: Methods in Enzymology 185:60-89 (1990)). Recombinant protein expression can be maximized in host bacteria by providing a genetic background wherein the host cell has an impaired capacity to proteolytically cleave the recombinant protein. (Gottesman, S., Gene Expression Technology: Methods in Enzymology 185, Academic Press, San Diego, Calif. (1990) 119-128). Alternatively, the sequence of the nucleic acid molecule of interest can be altered to provide preferential codon usage for a specific host cell, for example E. coli. (Wada et al., Nucleic Acids Res. 20:2111-2118 (1992)).

[0222] The nucleic acid molecules can also be expressed by expression vectors that are operative in yeast. Examples of vectors for expression in yeast e.g., S. cerevisiae include pYepSec1 (Baldari, et al., EMBO J. 6:229-234 (1987)), pMFa (Kurjan et al., Cell 30:933-943(1982)), pJRY88 (Schultz et al., Gene 54:113-123 (1987)), and pYES2 (Invitrogen Corporation, San Diego, Calif.).

[0223] The nucleic acid molecules can also be expressed in insect cells using, for example, baculovirus expression vectors. Baculovirus vectors available for expression of proteins in cultured insect cells (e.g., Sf 9 cells) include the pAc series (Smith et al., Mol. Cell Biol. 3:2156-2165 (1983)) and the pVL series (Lucklow et al., Virology 170:31-39 (1989)).

[0224] In certain embodiments of the invention, the nucleic acid molecules described herein are expressed in mammalian cells using mammalian expression vectors. Examples of mammalian expression vectors include pCDM8 (Seed, B. Nature 329:840(1987)) and pMT2PC (Kaufman et al., EMBO J. 6:187-195 (1987)).

[0225] The expression vectors listed herein are provided by way of example only of the well-known vectors available to those of ordinary skill in the art that would be useful to express the nucleic acid molecules. The person of ordinary skill in the art would be aware of other vectors suitable for maintenance propagation or expression of the nucleic acid molecules described herein. These are found for example in Sambrook, J., Fritsh, E. F., and Maniatis, T. Molecular Cloning: A Laboratory Manual. 3rd, ed., Cold Spring Harbor Laboratory, Cold Spring Harbor Laboratory Press, Cold Spring Harbor, N.Y., 2001.

[0226] The invention also encompasses vectors in which the nucleic acid sequences described herein are cloned into the vector in reverse orientation, but operably linked to a regulatory sequence that permits transcription of antisense RNA. Thus, an antisense transcript can be produced to all, or to a portion, of the nucleic acid molecule sequences described herein, including both coding and non-coding regions. Expression of this antisense RNA is subject to each of the parameters described above in relation to expression of the sense RNA (regulatory sequences, constitutive or inducible expression, tissue-specific expression).

[0227] The invention also relates to recombinant host cells containing the vectors described herein. Host cells therefore include prokaryotic cells, lower eukaryotic cells such as yeast, other eukaryotic cells such as insect cells, and higher eukaryotic cells such as mammalian cells.

[0228] The recombinant host cells are prepared by introducing the vector constructs described herein into the cells by techniques readily available to the person of ordinary skill in the art. These include, but are not limited to, calcium phosphate transfection, DEAE-dextran-mediated transfection, cationic lipid-mediated transfection, electroporation, transduction, infection, lipofection, and other techniques such as those found in Sambrook, et al. (Molecular Cloning: A Laboratory Manual. 3rd, ed., Cold Spring Harbor Laboratory, Cold Spring Harbor Laboratory Press, Cold Spring Harbor, N.Y., 2001).

[0229] Host cells can contain more than one vector. Thus, different nucleotide sequences can be introduced on different vectors of the same cell. Similarly, the nucleic acid molecules can be introduced either alone or with other nucleic acid molecules that are not related to the nucleic acid molecules such as those providing trans-acting factors for expression vectors. When more than one vector is introduced into a cell, the vectors can be introduced independently, co-introduced or joined to the nucleic acid molecule vector.

[0230] In the case of bacteriophage and viral vectors, these can be introduced into cells as packaged or encapsulated virus by standard procedures for infection and transduction. Viral vectors can be replication-competent or replication-defective. In the case in which viral replication is defective, replication will occur in host cells providing functions that complement the defects.

[0231] Vectors generally include selectable markers that enable the selection of the subpopulation of cells that contain the recombinant vector constructs. The marker can be contained in the same vector that contains the nucleic acid molecules described herein or may be on a separate vector. Markers include tetracycline or ampicillin-resistance genes for prokaryotic host cells and dihydrofolate reductase or neomycin resistance for eukaryotic host cells. However, any marker that provides selection for a phenotypic trait will be effective.

[0232] While the mature proteins can be produced in bacteria, yeast, mammalian cells, and other cells under the control of the appropriate regulatory sequences, cell-free transcription and translation systems can also be used to produce these proteins using RNA derived from the DNA constructs described herein.

[0233] Where secretion of the peptide is desired, which may be difficult to achieve with multi-transmembrane domain containing proteins such as PCATs, appropriate secretion signals are incorporated into the vector. The signal sequence can be endogenous to the peptides or heterologous to these peptides.

[0234] Where the peptide is not secreted into the medium, the protein can be isolated from the host cell by standard disruption procedures, including freeze thaw, sonication, mechanical disruption, use of lysing agents and the like. The peptide can then be recovered and purified by well-known purification methods including ammonium sulfate precipitation, acid extraction, anion or cationic exchange chromatography, phosphocellulose chromatography, hydrophobic-interaction chromatography, affinity chromatography, hydroxylapatite chromatography, lectin chromatography, or high performance liquid chromatography.

[0235] It is also understood that depending upon the host cell in recombinant production of the peptides described herein, the peptides can have various glycosylation patterns, depending upon the cell, or maybe non-glycosylated as when produced in bacteria. In addition, the peptides may include an initial modified methionine in some cases as a result of a host-mediated process.

### Uses of Vectors and Host Cells

[0236] The recombinant host cells expressing the peptides described herein have a variety of uses. First, the cells are useful for producing a PCAT protein or peptide that can be further purified to produce desired amounts of PCAT protein or fragments. Thus, host cells containing expression vectors are useful for peptide production.

[0237] Host cells are also useful for conducting cell-based assays involving the PCAT protein or PCAT protein fragments, such as those described above as well as other formats known in the art. Thus, a recombinant host cell expressing a native PCAT protein is useful for assaying compounds that stimulate or inhibit PCAT protein function.

[0238] Host cells are also useful for identifying PCAT protein mutants in which these functions are affected. If the mutants naturally occur and give rise to a pathology, host cells containing the mutations are useful to assay compounds that have a desired effect on the mutant PCAT protein (for example, stimulating or inhibiting function) which may not be indicated by their effect on the native PCAT protein.

[0239] Genetically engineered host cells can be further used to produce non-human transgenic animals. A transgenic animal is preferably a mammal, for example a rodent, such as a rat or mouse, in which one or more of the cells of the animal include a transgene. A transgene is exogenous DNA which is integrated into the genome of a cell from which a transgenic animal develops and which remains in the genome of the mature animal in one or more cell types or tissues of the transgenic animal. These animals are useful for studying the function of a PCAT protein and identifying and evaluating modulators of PCAT protein activity. Other examples of transgenic animals include non-human primates, sheep, dogs, cows, goats, chickens, and amphibians.

[0240] A transgenic animal can be produced by introducing nucleic acid into the male pronuclei of a fertilized oocyte, e.g., by microinjection, retroviral infection, and allowing the oocyte to develop in a pseudopregnant female foster animal. Any of the PCAT protein nucleotide sequences can be introduced as a transgene into the genome of a non-human animal, such as a mouse.

[0241] Any of the regulatory or other sequences useful in expression vectors can form part of the transgenic sequence. This includes intronic sequences and polyadenylation signals, if not already included. A tissue-specific regulatory sequence(s) can be operably linked to the transgene to direct expression of the PCAT protein to particular cells.

[0242] Methods for generating transgenic animals via embryo manipulation and microinjection, particularly animals such as mice, have become conventional in the art and are described, for example, in U.S. Pat. Nos. 4,736,866 and 4,870,009, both by Leder et al., U.S. Pat. No. 4,873,191 by Wagner et al. and in Hogan, B., Manipulating the Mouse Embryo, (Cold Spring Harbor Laboratory Press, Cold Spring Harbor, N.Y., 1986). Similar methods are used for production of other transgenic animals. A transgenic founder animal can be identified based upon the presence of the transgene in its genome and/or expression of transgenic mRNA in tissues or cells of the animals. A transgenic founder animal can then be used to breed additional animals carrying the transgene. Moreover, transgenic animals carrying a transgene can further be bred to other transgenic animals carrying other transgenes. A transgenic animal also includes animals in which the entire animal or tissues in the animal have been produced using the homologously recombinant host cells described herein.

[0243] In another embodiment, transgenic non-human animals can be produced which contain selected systems that allow for regulated expression of the transgene. One example of such a system is the cre/loxP recombinase system of bacteriophage P1. For a description of the cre/loxP recombinase system, see, e.g., Lakso et al. PNAS 89:6232-6236 (1992). Another example of a recombinase system is the FLP recombinase system of S. cerevisiae (O'Gorman et al. Science 251:1351-1355 (1991). If a cre/loxP recombinase system is used to regulate expression of the transgene, animals containing transgenes encoding both the Cre recombinase and a selected protein is required. Such animals can be provided through the construction of “double” transgenic animals, e.g., by mating two transgenic animals, one containing a transgene encoding a selected protein and the other containing a transgene encoding a recombinase.

[0244] Clones of the non-human transgenic animals described herein can also be produced according to the methods described in Wilmut, I. et al. Nature 385:810-813 (1997) and PCT International Publication Nos. WO 97/07668 and WO 97/07669. In brief, a cell, e.g., a somatic cell, from the transgenic animal can be isolated and induced to exit the growth cycle and enter Go phase. The quiescent cell can then be fused, e.g., through the use of electrical pulses, to an enucleated oocyte from an animal of the same species from which the quiescent cell is isolated. The reconstructed oocyte is then cultured such that it develops to morula or blastocyst and then transferred to pseudopregnant female foster animal. The offspring born of this female foster animal will be a clone of the animal from which the cell, e.g., the somatic cell, is isolated.

[0245] Transgenic animals containing recombinant cells that express the peptides described herein are useful to conduct the assays described herein in an in vivo context. Accordingly, the various physiological factors that are present in vivo and that could effect substrate binding, PCAT protein activation, and signal transduction, may not be evident from in vitro cell-free or cell-based assays. Accordingly, it is useful to provide non-human transgenic animals to assay in vivo PCAT protein function, including substrate interaction, the effect of specific mutant PCAT proteins on PCAT protein function and substrate interaction, and the effect of chimeric PCAT proteins. It is also possible to assess the effect of null mutations, that is, mutations that substantially or completely eliminate one or more PCAT protein functions.

### Detection and Diagnosis

[0246] The present invention provides a method for detecting PCAT nucleic acids, proteins, peptides and fragments thereof that are differentially expressed in pancreatic diseases in a test sample, preferably in a biological sample.

[0247] The present invention further provides a method for diagnosing the pancreatic diseases, by detecting the nucleic acids, proteins, peptides and fragments thereof. The further embodiment includes but is not limited to, monitoring the disease prognosis (recurrence), diagnosing disease stage, preventing the disease and treating the disease.

[0248] As used herein, a “biological sample” can be collected from tissues, blood, sera, cell lines or biological fluids such as, plasma, interstitial fluid, urine, cerebrospinal fluid, and the like, containing cells. In preferred embodiments, a biological sample comprises cells or tissues suspected of having diseases (e.g., cells obtained from a biopsy).

[0249] As used herein, a “differential level” is defined as the level of PCAT protein or nucleic acids in a test sample either above or below the level of the ones in control samples, wherein the level of control samples is obtained from a control cell line, a normal tissue or body fluids, or combination thereof, or from a healthy subject. While the protein is overexpressed, the expression of PCAT is preferably greater than about 20%, or preferably greater than about 30%, and most preferably greater than about 50% or more of pancreatic disease sample, at a level that is at least two fold, and preferably at least five fold, greater than the level of expression in control samples, as determined using a representative assay provided herein. While the protein is underexpressed, the expression of PCAT is preferably less than about 20%, or preferably less than 30%, and most preferably less than about 50% or more of the pancreatic disease sample, at a level that is at least 0.5 fold, and preferably at least 0.2 fold less than the level of the expression in control samples, as determined using a representative assay provided herein.

[0250] As used herein, a “subject” can be a mammalian subject or non mammalian subject, preferably, a mammalian subject. A mammalian subject can be human or non-human, preferably human. A healthy subject is defined as a subject without detectable pancreatic diseases or pancreatic associated diseases by using conventional diagnostic methods.

[0251] As used herein, the “diseases” include pancreatic diseases and pancreatic associated diseases. Preferably, the pancreatic disease is pancreatic cancer.

[0252] As used herein, “cancer” includes epithelial-cell related cancers, for example pancreatic, lung, colon, prostate, ovarian, breast, bladder renal, hepatocellular, pharyngeal and gastric cancers.

### Nucleic Acid Detections

[0253] The present invention is not limited to the detection methods described above. Any suitable detection method that allows for the specific detection of pancreatic disease cells, tissues or organs may be utilized. For example, in some embodiments, the expression of RNA corresponding to a PCAT gene is detected by hybridization to an antisense oligonucleotide (described below). In other embodiments, RNA expression is detected by hybridization assays such as Northern blots, RNase assays, reverse transcriptase PCR amplification, and the like. One preferred detection method is using RT PCR by using TaqMan technology (ABI, Foster City, Calif.).

[0254] In another embodiment, the present invention provides a method for diagnosing or detecting pancreatic diseases in a subject comprising: determining the level of one or more PCAT nucleic acid molecules or any fragment(s) thereof in a test sample from said subject, wherein said PCAT nucleic acid molecule(s) comprises a sequence selected from a group consisting of SEQ ID NOS: 289-702 and a combination thereof; wherein a differential level of said PCAT nucleic acid molecule(s) relative to the level of said nucleic acid molecule(s) in a test sample from a healthy subject, or the level established for a healthy subject, is indicative of pancreatic diseases.

[0255] In another embodiment, the detecting or diagnosing method comprises determining level of differential expression of 2, 4, 8, 10, 20 or more nucleic acid molecules, preferably, the nucleic acid molecules comprise or consists of a sequence selected from the group consisting of SEQ ID NOS: 289-702 and combination thereof.

[0256] In further embodiments of the present invention, the presence of particular sequences in the genome of a subject is detected. Such sequences include PCAT sequences associated with abnormal expression of PCAT (e.g., overexpression or expression at a physiological inappropriate time). These sequences include polymorphisms, including polymorphisms in the transcribed sequence (e.g., that effect PCAT processing and/or translation) and regulatory sequences such as promoters, enhances, repressors, and the like. These sequences may also include polymorphisms in genes or control sequences associated with factors that affect expression such as transcription factors, and the like. Any suitable method for detecting and/or identifying these sequences is within the scope of the present invention including, but not limited to, nucleic acid sequencing, hybridization assays (e.g., Southern blotting), single nucleotide polymorphism assays (See e.g., U.S. Pat. No. 5,994,069, herein incorporated by reference in its entirety), and the like.

### Protein Detections

[0257] The present invention provides methods for diagnosing or detecting the differential presence of PCAT proteins. In some embodiments (e.g., where PCATs are overexpressed in diseased cells), PCAT proteins are detected directly. In other embodiments (e.g., where the presence of a PCATs are underexpressed), PCATs to the disease antigens are detected non-existence.

[0258] The diagnostic methods of the present invention find utility in the diagnosis and characterization of diseases. For example, the presence of an antibody to a specific protein may be indicative of a cancer or disease. In addition, certain PCAT may be indicative of a specific stage or sub-type of the same cancer or disease.

[0259] The information obtained is also used to determine prognosis and appropriate course of treatment. For example, it is contemplated that individuals with a specific PCAT expression or stage of pancreatic diseases may respond differently to a given treatment that individuals lacking the PCAT expression. The information obtained from the diagnostic methods of the present invention thus provides for the personalization of diagnosis and treatment.

[0260] In one embodiment, the present invention provides a method for monitoring pancreatic diseases treatment in a subject comprising: determining the level of one or more PCAT proteins or any fragment(s) or peptide(s) thereof in a test sample from said subject, wherein said PCAT protein(s) comprises a sequence selected from a group consisting of SEQ ID NOS: 1-288, SEQ ID NOS: 703-873 and a combination thereof; wherein an level of said PCAT protein(s) similar to the level of said protein(s) in a test sample from a healthy subject, or the level established for a healthy subject, is indicative of successful treatment.

[0261] In another embodiment, the present invention provides a method for diagnosing recurrence of pancreatic diseases following successful treatment in a subject comprising: determining the level of one or more PCAT proteins or any fragment(s) or peptide(s) thereof in a test sample from said subject, wherein said PCAT protein(s) comprises a sequence selected from a group consisting of SEQ ID NOS: 1-288, SEQ ID NOS: 703-873 and a combination thereof; wherein a changed level of said PCAT protein(s) relative to the level of said protein(s) in a test sample from a healthy subject, or the level established for a healthy subject, is indicative of recurrence of pancreatic diseases.

[0262] In yet another embodiment, the present invention provides a method for diagnosing or detecting pancreatic diseases in a subject comprising: determining the level of one or more PCAT proteins or any fragment(s) or peptides thereof in a test sample from said subject, wherein said PCAT protein(s) comprises a sequence selected from a group consisting of SEQ ID NOS: 1-288, SEQ ID NOS: 703-873 and a combination thereof; wherein a differential level of said PCAT protein(s) relative to the level of said protein(s) in a test sample from a healthy subject, or the level established for a healthy subject, is indicative of pancreatic diseases.

[0263] The detecting or diagnosing method comprises determining level of differential expression of 2, 4, 8, 10, 20 or more proteins, preferably, the proteins are selected from a group consisting of SEQ ID NOS: 1-288 and combination thereof.

[0264] Further, the detecting or diagnosing method comprises determining level of differential expression of 5, 10, 15, 20, 40, 60, 80, 100 or more PCAT peptides, preferably the peptides are selected from the group consisting of SEQ ID NOS: 703-873 and combination thereof.

[0265] These methods are also useful for diagnosing diseases that show differential protein expression. As describe earlier, normal, control or standard values or level established from a healthy subject for protein expression are established by combining body fluids or tissue, cell extracts taken from a normal healthy mammalian or human subject with specific antibodies to a protein under conditions for complex formation. Standard values for complex formation in normal and diseased tissues are established by various methods, often photometric means. Then complex formation as it is expressed in a subject sample is compared with the standard values. Deviation from the normal standard and toward the diseased standard provides parameters for disease diagnosis or prognosis while deviation away from the diseased and toward the normal standard may be used to evaluate treatment efficacy.

[0266] In yet another embodiment, the present invention provides a detection or diagnostic method of PCATs by using LC/MS. The proteins from cells are prepared by methods known in the art (for example, R. Aebersold Nature Biotechnology Volume 21 Number 6 Jun. 2003). The differential expression of proteins in disease and healthy samples are quantitated using Mass Spectrometry and ICAT (Isotope Coded Affinity Tag) labeling, which is known in the art. ICAT is an isotope label technique that allows for discrimination between two populations of proteins, such as a healthy and a disease sample. The LC/MS spectra are collected for the labeled samples. The raw scans from the LC/MS instrument are subjected to peak detection and noise reduction software. Filtered peak lists are then used to detect ‘features’ corresponding to specific peptides from the original sample(s). Features are characterized by their mass/charge, charge, retention time, isotope pattern and intensity.

[0267] The intensity of a peptide present in both healthy and disease samples can be used to calculate the differential expression, or relative abundance, of the peptide. The intensity of a peptide found exclusively in one sample can be used to calculate a theoretical expression ratio for that peptide (singleton). Expression ratios are calculated for each peptide of each replicate of the experiment (Table 1). Thus overexpression or under expression of PCAT protein or peptide are similar to the expression pattern in Table 1 in a test subject indicates the likelihood of having pancreatic diseases or diseases associated with pancreas.

[0268] Immunological methods for detecting and measuring complex formation as a measure of protein expression using either specific polyclonal or monoclonal antibodies are known in the art. Examples of such techniques include enzyme-linked immunosorbent assays (ELISAs), radioimmunoassays (RIAs), fluorescence-activated cell sorting (FACS) and antibody arrays. Such immunoassays typically involve the measurement of complex formation between the protein and its specific antibody. These assays and their quantitation against purified, labeled standards are well known in the art (Ausubel, supra, unit 10.1-10.6). A two-site, monoclonal-based immunoassay utilizing antibodies reactive to two non-interfering epitopes is preferred, but a competitive binding assay may be employed (Pound (1998) Immunochemical Protocols, Humana Press, Totowa N.J.). More immunological detections are described in the sections below.

### Antibody Detections

[0269] Antibodies are useful to detect the presence of one of the proteins or fragments thereof, peptides of the present invention in cells or tissues to determine the pattern of expression of the proteins among various tissues in an organism and over the course of normal development.

[0270] Further, as described above, the antibodies can be used to assess expression in disease states such as in active stages of the disease or in an individual with a predisposition toward disease related to the protein's function. The antibodies can also be used to assess normal and aberrant subcellular localization of cells in the various tissues in an organism.

[0271] Detection on a protein by an antibody can be facilitated by coupling (i.e., physically linking) the antibody to a detectable substance. Examples of detectable substances include various enzymes, prosthetic groups, fluorescent materials, luminescent materials, bioluminescent materials, and radioactive materials (see below). The antibodies may also be useful in diagnostic assays, e.g., for detecting expression of an antigen, for example PCAT protein, peptide or fragment thereof, in specific cells, tissues, blood, serum or body fluids.

[0272] For diagnostic applications, the antibody or its variant typically will be labeled with a detectable moiety. Numerous labels are available which can be generally grouped into the following categories:

[0273] (a) Radioisotopes, such as ³⁶S, ¹⁴C, ¹²⁵I, ³H, and ¹³¹I. The antibody variant can be labeled with the radioisotope using the techniques described in Current Protocols in Immunology, vol 1-2, Coligen et al., Ed., Wiley-Interscience, New York, Pubs. (1991) for example and radioactivity can be measured using scintillation counting.

[0274] (b) Fluorescent labels such as rare earth chelates (europium chelates) or fluorescein and its derivatives, rhodamine and its derivatives, dansyl, Lissamine, phycoerythrin and Texas Red are available. The fluorescent labels can be conjugated to the antibody variant using the techniques disclosed in Current Protocols in Immunology, supra, for example. Fluorescence can be quantified using a fluorimeter.

[0275] (c) Various enzyme-substrate labels are available and U.S. Pat. Nos. 4,275,149, and 4,318,980 provides a review of some of these. The enzyme generally catalyzes a chemical alteration of the chromogenic substrate which can be measured using various techniques. For example, the enzyme may catalyze a color change in a substrate, which can be measured spectrophotometrically. Alternatively, the enzyme may alter the fluorescence or chemiluminescence of the substrate. Techniques for quantifying a change in fluorescence are described above. The chemiluminescent substrate becomes electronically excited by a chemical reaction and may then emit light which can be measured (using a chemiluminometer, for example) or donates energy to a fluorescent acceptor. Examples of enzymatic labels include luciferases (e.g., firefly luciferase and bacterial luciferase; U.S. Pat. No. 4,737,456), luciferin, 2,3-dihydrophthalazinediones, malate dehydrogenase, urease, peroxidase such as horseradish peroxidase (HRPO), alkaline phosphatase, β-galactosidase, glucoamylase, lysozyme, saccharide oxidases (e.g., glucose oxidase, galactose oxidase, and glucose-6-phosphate dehydrogenase), heterocyclic oxidases (such as uricase and xanthine oxidase), lactoperoxidase, microperoxidase, and the like. Techniques for conjugating enzymes to antibodies are described in O'Sullivan et al., Methods for the Preparation of Enzyme-Antibody Conjugates for Use in Enzyme Immunoassay, in Methods in Enzyme. (Ed. J. Langone & H. Van Vunakis), Academic press, New York, 73: 147-166 (1981).

[0276] Sometimes, the label is indirectly conjugated with the antibody. The skilled artisan will be aware of various techniques for achieving this. For example, the antibody can be conjugated with biotin and any of the three broad categories of labels mentioned above can be conjugated with avidin, or vice versa. Biotin binds selectively to avidin and thus, the label can be conjugated with the antibody in this indirect manner. Alternatively, to achieve indirect conjugation of the label with the antibody, the antibody is conjugated with a small hapten (e.g. digloxin) and one of the different types of labels mentioned above is conjugated with an anti-hapten antibody (e.g. anti-digloxin antibody). Thus, indirect conjugation of the label with the antibody can be achieved.

[0277] In another embodiment of the invention, the antibody needs not be labeled, and the presence thereof can be detected using a labeled antibody, which binds to the antibody.

[0278] The antibodies of the present invention may be employed in any known assay method, such as competitive binding assays, direct and indirect sandwich assays, and immunoprecipitation assays. Zola, Monoclonal Antibodies: A Manual of Techniques, pp. 147-158 (CRC Press, Inc. 1987).

[0279] The biological samples can then be tested directly for the presence of PCAT by assays (e.g., ELISA or radioimmunoassay) and format (e.g., microwells, dipstick as described in International Patent Publication WO 93/03367). Alternatively, proteins in the sample can be size separated (e.g., by polyacrylamide gel electrophoresis (PAGE)), in the presence or absence of sodium dodecyl sulfate (SDS), and the presence of PCAT detected by immunoblotting (e.g., Western blotting). Immunoblotting techniques are generally more effective with antibodies generated against a peptide corresponding to an epitope of a protein, and hence, are particularly suited to the present invention.

[0280] Antibody binding is detected by techniques known in the art (e.g., radioimmunoassay, ELISA (enzyme-linked immunosorbant assay), “sandwich” immunoassays, immunoradiometric assays, gel diffusion precipitation reactions, immunodiffusion assays, in situ immunoassays (e.g., using colloidal gold, enzyme or radioisotope labels, for example), Western blots, precipitation reactions, agglutination assays (e.g., gel agglutination assays, hemagglutination assays, etc.), complement fixation assays, immunofluorescence assays, protein A assays, and immunoelectrophoresis assays, etc.

[0281] In one embodiment, antibody binding is detected by detecting a label on the primary antibody. In another embodiment, the primary antibody is detected by detecting binding of a secondary antibody or reagent to the primary antibody. In a further embodiment, the secondary antibody is labeled. Many means are known in the art for detecting binding in an immunoassay and are within the scope of the present invention. As is well known in the art, the immunogenic peptide should be provided free of the carrier molecule used in any immunization protocol. For example, if the peptide was conjugated to KLH, it may be conjugated to BSA, or used directly, in a screening assay. In some embodiments, an automated detection assay is utilized. Methods for the automation of immunoassays are well known in the art (See e.g., U.S. Pat. Nos. 5,885,530, 4,981,785, 6,159,750, and 5,358,691, each of which is herein incorporated by reference). In some embodiments, the analysis and presentation of results is also automated. For example, in some embodiments, software that generates a prognosis based on the presence or absence of a series of antigens is utilized.

[0282] Competitive binding assays rely on the ability of a labeled standard to compete with the test sample for binding with a limited amount of antibody. The amount of antigen in the test sample is inversely proportional to the amount of standard that becomes bound to the antibodies. To facilitate determining the amount of standard that becomes bound, the antibodies generally are insolubilized before or after the competition. As a result, the standard and test sample that are bound to the antibodies may conveniently be separated from the standard and test sample, which remain unbound.

[0283] Sandwich assays involve the use of two antibodies, each capable of binding to a different immunogenic portion, or epitope, or the protein to be detected. In a sandwich assay, the test sample to be analyzed is bound by a first antibody, which is immobilized on a solid support, and thereafter a second antibody binds to the test sample, thus forming an insoluble three-part complex. See e.g., U.S. Pat. No. 4,376,110. The second antibody may itself be labeled with a detectable moiety (direct sandwich assays) or may be measured using an anti-immunoglobulin antibody that is labeled with a detectable moiety (indirect sandwich assay). For example, one type of sandwich assay is an ELISA assay, in which case the detectable moiety is an enzyme.

[0284] The antibodies may also be used for in vivo diagnostic assays. Generally, the antibody is labeled with a radionucleotide (such as ¹¹¹In, ⁹⁹Tc, ¹⁴C, ¹³¹I, ³H, ³²P or ³⁵S) so that the tumor can be localized using immunoscintiography. In one embodiment, antibodies or fragments thereof bind to the extracellular domains of two or more PCAT targets and the affinity value (Kd) is less than 1×10⁸ M.

[0285] Antibodies for diagnostic use may be labeled with probes suitable for detection by various imaging methods. Methods for detection of probes include, but are not limited to, fluorescence, light, confocal and electron microscopy; magnetic resonance imaging and spectroscopy; fluoroscopy, computed tomography and positron emission tomography. Suitable probes include, but are not limited to, fluorescein, rhodamine, eosin and other fluorophores, radioisotopes, gold, gadolinium and other lanthanides, paramagnetic iron, fluorine-18 and other positron-emitting radionuclides. Additionally, probes may be bi- or multi-functional and be detectable by more than one of the methods listed. These antibodies may be directly or indirectly labeled with said probes. Attachment of probes to the antibodies includes covalent attachment of the probe, incorporation of the probe into the antibody, and the covalent attachment of a chelating compound for binding of probe, amongst others well recognized in the art.

[0286] For immunohistochemistry, the disease tissue sample may be fresh or frozen or may be embedded in paraffin and fixed with a preservative such as formalin (see Examples). The fixed or embedded section contains the sample are contacted with a labeled primary antibody and secondary antibody, wherein the antibody is used to detect the PCAT protein express in situ. The detailed procedure is shown in the Example.

### Array:

[0287] “Array” refers to an ordered arrangement of at least two transcripts, proteins or peptides, or antibodies on a substrate. At least one of the transcripts, proteins, or antibodies represents a control or standard, and the other transcript, protein, or antibody is of diagnostic or therapeutic interest. The arrangement of at least two and up to about 40,000 transcripts, proteins, or antibodies on the substrate assures that the size and signal intensity of each labeled complex, formed between each transcript and at least one nucleic acid, each protein and at least one ligand or antibody, or each antibody and at least one protein to which the antibody specifically binds, is individually distinguishable.

[0288] An “expression profile” is a representation of gene expression in a sample. A nucleic acid expression profile is produced using sequencing, hybridization, or amplification technologies using transcripts from a sample. A protein expression profile, although time delayed, minors the nucleic acid expression profile and is produced using gel electrophoresis, mass spectrometry, or an array and labeling moieties or antibodies which specifically bind the protein. The nucleic acids, proteins, or antibodies specifically binding the protein may be used in solution or attached to a substrate, and their detection is based on methods well known in the art.

[0289] A substrate includes but not limited to, paper, nylon or other type of membrane, filter, chip, glass slide, or any other suitable solid support. The invention also provides an array with a cDNA or transcript encoding PCAT proteins or peptides or fragments thereof, antibodies that specifically bind PCAT proteins, peptides or fragments thereof. Preferably, two or more of the nucleic acid molecules (e.g., SEQ ID NOS: 289-702), proteins (e.g., SEQ ID NOS: 1-288) or peptides (e.g., SEQ ID NOS: 703-873) are immobilized on a substrate. Specifically, the following targets are selected for targeting purpose: Tissue Factor, GS3786, Na/K ATPase Beta-3, Kunitz Type inhibitor-2 (HAI-2), CD46, CD166, Neutral Amino Acid Transporter (ASCT2), Transglutaminase-2 (TGM2), Kunitz Inhibitor-1, ErbB3, Mucin 4, Decay Accelerating Factor (DAF).

[0290] The present invention also provides an antibody array. Antibody arrays have allowed the development of techniques for high-throughput screening of recombinant antibodies. Such methods use robots to pick and grid bacteria containing antibody genes, and a filter-based ELISA to screen and identify clones that express antibody fragments. Because liquid handling is eliminated and the clones are arrayed from master stocks, the same antibodies can be spotted multiple times and screened against multiple antigens simultaneously. For more information, see de Wildt et al. (2000) Nat Biotechnol 18:989-94.

[0291] The array is prepared and used according to the methods described in U.S. Pat. No. 5,837,832, Chee et al., PCT application WO95/11995 (Chee et al.), Lockhart, D. J. et al. (1996; Nat. Biotech. 14: 1675-1680) and Schena, M. et al. (1996; Proc. Natl. Acad. Sci. 93: 10614-10619), U.S. Pat. No. 5,807,522, Brown et al., all of which are incorporated herein in their entirety by reference.

[0292] In one embodiment, a nucleic acid array or a microarray, preferably composed of a large number of unique, single-stranded nucleic acid sequences, usually either synthetic antisense oligonucleotides or fragments of cDNAs, fixed to a solid support. The oligonucleotides are preferably about 6-60 nucleotides in length, more preferably 15-30 nucleotides in length, and most preferably about 20-25 nucleotides in length.

[0293] In order to produce oligonucleotides to a known sequence for an array, the gene(s) of interest (or an ORF identified from the contigs of the present invention) is typically examined using a computer algorithm which starts at the 5′ or at the 3′ end of the nucleotide sequence. Typical algorithms will then identify oligomers of defined length that are unique to the gene, have a GC content within a range suitable for hybridization, and lack predicted secondary structure that may interfere with hybridization. In certain situations it may be appropriate to use pairs of oligonucleotides on an array. The “pairs” will be identical, except for one nucleotide that preferably is located in the center of the sequence. The second oligonucleotide in the pair (mismatched by one) serves as a control. The number of oligonucleotide pairs may range from two to one million. The oligomers are synthesized at designated areas on a substrate using a light-directed chemical process, wherein the substrate may be paper, nylon or other type of membrane, filter, chip, glass slide or any other suitable solid support as described above.

[0294] In another aspect, an oligonucleotide may be synthesized on the surface of the substrate by using a chemical coupling procedure and an ink jet application apparatus, as described in PCT application WO95/251116 (Baldeschweiler et al.) which is incorporated herein in its entirety by reference.

[0295] A gene expression profile comprises the expression of a plurality of transcripts as measured by hybridization with a sample. The transcripts of the invention may be used as elements on an array to produce a gene expression profile. In one embodiment, the array is used to diagnose or monitor the progression of disease. Researchers can assess and catalog the differences in gene expression between healthy and diseased tissues or cells.

[0296] For example, the transcript or probe may be labeled by standard methods and added to a biological sample from a patient under conditions for the formation of hybridization complexes. After an incubation period, the sample is washed and the amount of label (or signal) associated with hybridization complexes, is quantified and compared with a standard value. If complex formation in the patient sample is significantly altered (higher or lower) in comparison to either a normal or disease standard, then differential expression indicates the presence of a disorder.

[0297] In order to provide standards for establishing differential expression, normal and disease expression profiles are established. This is accomplished by combining a sample taken from normal subjects, either animal or human or nonmammal, with a transcript under conditions for hybridization to occur. Standard hybridization complexes may be quantified by comparing the values obtained using normal subjects with values from an experiment in which a known amount of a purified sequence is used. Standard values obtained in this manner may be compared with values obtained from samples from patients who were diagnosed with a particular condition, disease, or disorder. Deviation from standard values toward those associated with a particular disorder is used to diagnose that disorder.

[0298] By analyzing changes in patterns of gene/protein expression, disease can be diagnosed at earlier stages before the patient is symptomatic. The invention can be used to formulate a prognosis and to design a treatment regimen. The invention can also be used to monitor the efficacy of treatment. For treatments with known side effects, the array is employed to improve the treatment regimen. A dosage is established that causes a change in genetic expression patterns indicative of successful treatment. Expression patterns associated with the onset of undesirable side effects are avoided.

[0299] In another embodiment, animal models which mimic a human disease can be used to characterize expression profiles associated with a particular condition, disease, or disorder; or treatment of the condition, disease, or disorder. Novel treatment regimens may be tested in these animal models using arrays to establish and then follow expression profiles over time. In addition, arrays may be used with cell cultures or tissues removed from animal models to rapidly screen large numbers of candidate drug molecules, looking for ones that produce an expression profile similar to those of known therapeutic drugs, with the expectation that molecules with the same expression profile will likely have similar therapeutic effects. Thus, the invention provides the means to rapidly determine the molecular mode of action of a drug.

[0300] Such assays may also be used to evaluate the efficacy of a particular therapeutic treatment regimen in animal studies or in clinical trials or to monitor the treatment of an individual patient. Once the presence of a condition is established and a treatment protocol is initiated, diagnostic assays may be repeated on a regular basis to determine if the level of expression in the patient begins to approximate that, which is observed in a normal subject. The results obtained from successive assays may be used to show the efficacy of treatment over a period ranging from several days to years.

[0301] In one embodiment, the detected targets comprise, consist essentially of or consist of combinations of PCAT proteins or nucleic acids encoding such proteins. The combinations are either 2, 3, 4, 5, 6, 7, 8, 9, 10, 15, 20, 25, 30, 35, 40, 50, 60, 70, 80, 90, 100, 150, 200, 250 proteins (SEQ ID NOS: 1-288), nucleic acids (SEQ ID NOS: 289-702) encoding such proteins, or peptides (SEQ ID NOS: 703-873).

[0302] In one embodiment, the combinations of the protein or nucleic acid targets for detection of a pancreatic cancer comprise targets selected from a group consisting of Tissue Factor, GS3786, Na/K ATPase Beta-3, Kunitz Type inhibitor-1 (HAI-1), Kunitz Type inhibitor-2 (HAI-2), CD46, CD166, Neutral Amino Acid Transporter (ASCT2), Transglutaminase-2 (TGM2), Kunitz Inhibitor-1, ErbB3, Mucin 4, Decay Accelerating Factor (DAF), wherein their corresponding sequences are listed in Table 2.

[0303] In another embodiment, the detection targets are combination of all the targets of Tissue Factor, GS3786, Na/K ATPase Beta-3, Kunitz Type inhibitor-1 (HAI-1), Kunitz Type inhibitor-2 (HAI-2), CD46, CD166, Neutral Amino Acid Transporter (ASCT2), Transglutaminase-2 (TGM2), Kunitz Inhibitor-1, ErbB3, Mucin 4, Decay Accelerating Factor (DAF).

[0304] In yet another embodiment, the invention provides a composition comprising a plurality of PCAT nucleic acid sequences for use in detecting the differential expression of genes in a disease state, wherein said plurality of nucleic acid sequences comprise two or more sequences of SEQ ID NOS: 289-702, or all the sequences of SEQ ID NOS: 289-702, or the complete complements thereof. Further, the nucleic acid sequences are immobilized on a substrate, and the said nucleic acid sequences are hybridizable elements on a microarray.

[0305] In yet another embodiment, the invention provides a composition comprising a plurality of PCAT proteins or peptides for use in detecting the differential expression of proteins in a disease state wherein said plurality of protein sequences comprise two or more sequences of SEQ ID NOS: 1-288 or all sequence of SEQ ID NOS: 1-288; and wherein said plurality of peptide sequences comprise two or more sequences of SEQ ID NOS: 703-873 or all sequence of SEQ ID NOS: 703-873.

[0306] In yet another embodiment, the compositions can be used in diagnosing or monitoring the treatment of pancreatic cancer

### Treatment

[0307] The following terms, as used in the present specification and claims, are intended to have the meaning as defined below, unless indicated otherwise.

[0308] “Treat,” “treating” or “treatment” of a disease includes: (1) inhibiting the disease, i.e., arresting or reducing the development of the disease or its clinical symptoms, or (2) relieving the disease, i.e., causing regression of the disease or its clinical symptoms.

[0309] A “therapeutically effective amount” means the amount of an agent that, when administered to a subject for treating a disease, is sufficient to effect such treatment for the disease. The “therapeutically effective amount” will vary depending on the agent, the disease and its severity and the age, weight, etc., of the subject to be treated.

[0310] A “pancreatic disease” includes pancreatic cancer, pancreatic tumor (exocrine or endocrine), pancreatic cysts, acute pancreatitis, chronic pancreatitis, diabetes (type I and II) as well as pancreatic trauma, preferably pancreatic cancer.

[0311] A “cancer” is epithelial-cell related cancers include but not limited to pancreatic, lung, colon, prostate, ovarian, breast, bladder renal, hepatocellular, pharyngeal and gastric cancers.

[0312] The present invention provides an application of treatment by using antibody, immunogenic peptides as well as other PCAT agonists or antagonists.

[0313] PCATs are proteins differentially expressed in the pancreatic diseases cell lines or tissues. The proteins are either cell surface proteins or cytosolic proteins (see the list in Table 2). These proteins are associated with the diseases especially pancreatic diseases, particularly pancreatic cancer; thus, they serve as candidate targets for the treatment of the diseases.

[0314] In one embodiment, when decreased expression or activity of the protein is desired, an inhibitor, antagonist, antibody and the like or a pharmaceutical agent containing one or more of these molecules may be delivered. Such delivery may be effected by methods well known in the art and may include delivery by an antibody specifically targeted to the protein. Neutralizing antibodies, which inhibit dimer formation, are generally preferred for therapeutic use.

[0315] In another embodiment, when increased expression or activity of the protein is desired, the protein, an agonist, an enhancer and the like or a pharmaceutical agent containing one or more of these molecules may be delivered. Such delivery may be effected by methods well known in the art and may include delivery of a pharmaceutical agent by an antibody specifically targeted to the protein.

[0316] Any of the transcripts, complementary molecules, or fragments thereof, proteins or portions thereof, vectors delivering these nucleic acid molecules or expressing the proteins, and their ligands may be administered in combination with other therapeutic agents. Selection of the agents for use in combination therapy may be made by one of ordinary skill in the art according to conventional pharmaceutical principles. A combination of therapeutic agents may act synergistically to affect treatment of a particular disorder at a lower dosage of each agent.

### Antibody Therapy

[0317] The antibody of the present invention can be used for therapeutic reasons. It is contemplated that the antibody of the present invention may be used to treat a mammal, preferably a human with pancreatic diseases.

[0318] In general, the antibodies are also useful for inhibiting protein function, for example, blocking the binding of the PCAT protein or peptide to a binding partner such as a substrate. These uses can also be applied in a therapeutic context in which treatment involves inhibiting the protein's function. An antibody can be used, for example, to block binding, thus modulating (agonizing or antagonizing) the peptides activity. Antibodies can be prepared against specific fragments containing sites required for function or against intact protein that is associated within a cell or cell membrane. The function blocking assays are provided in detail in the Examples. Other evidence is provided in U.S. Pat. No. 6,207,152, and U.S. Pat. No. 6,387,371.

[0319] The antibodies of present invention can also be used as means of enhancing the immune response. The antibodies can be administered in amounts similar to those used for other therapeutic administrations of antibody. For example, pooled gamma globulin is administered at a range of about 1 mg to about 100 mg per patient. Thus, antibodies reactive with the protein or peptides of PCAT can be passively administered alone or in conjunction with other anti-cancer therapies to a mammal afflicted-with pancreatic diseases or cancer. Examples of anti-cancer therapies include, but are not limited to, chemotherapy, radiation therapy, adoptive immunotherapy therapy with TIL (Tumor Infiltration Lymphocytes).

[0320] The selection of an antibody subclass for therapy will depend upon the nature of the disease tumor antigen. For example, an IgM may be preferred in situations where the antigen is highly specific for the diseased target and rarely occurs on normal cells. However, where the disease-associated antigen is also expressed in normal tissues, although at much lower levels, the IgG subclass may be preferred for the following reason: since the binding of at least two IgG molecules in close proximity is required to activate complement, less complement mediated damage may occur in the normal tissues which express smaller amounts of the antigen and, therefore, bind fewer IgG antibody molecules. Furthermore, IgG molecules by being smaller may be more able than IgM molecules to localize to the diseased tissue.

[0321] The mechanism for antibody therapy is that the therapeutic antibody recognizes a cell surface protein or a cytosolic protein that is overexpressed in diseased cells. By NK cell or complement activation, conjugation of the antibody with an immunotoxin or radiolabel, the interaction can abrogate ligand/receptor interaction or activation of apoptosis.

[0322] The potential mechanisms of antibody-mediated cytotoxicity of diseased cells are phagocyte (antibody dependent cellular cytotoxicity (ADCC)) (see Example), complement (Complement-mediated cytotoxicity (CMC)) (see Example), naked antibody (receptor cross-linking apoptosis and growth factor inhibition), or targeted payload labeled with radionuclide or immunotoxins or immunochemotherapeutics.

[0323] In one embodiment, the antibody is administered to a nonhuman mammal for the purposes of obtaining preclinical data, for example. Exemplary nonhuman mammals to be treated include nonhuman primates, dogs, cats, rodents and other mammals in which preclinical studies are performed. Such mammals may be established animal models for a disease to be treated with the antibody or may be used to study toxicity of the antibody of interest. In each of these embodiments, dose escalation studies may be performed on the mammal.

[0324] The antibody is administered by any suitable means, including parenteral, subcutaneous, intraperitoneal, intrapulmonary, and intranasal, and, if desired for local immunosuppressive treatment, intralesional administration. Parenteral infusions include intramuscular, intravenous, intraarterial, intraperitoneal, or subcutaneous administration. In addition, the antibody variant is suitably administered by pulse infusion, particularly with declining doses of the antibody variant. Preferably the dosing is given by injections, most preferably intravenous or subcutaneous injections, depending in part on whether the administration is brief or chronic.

[0325] For the prevention or treatment of a disease, the appropriate dosage of the antibody will depend on the type of disease to be treated, the severity and the course of the disease, whether the antibody is administered for preventive or therapeutic purposes, previous therapy, the patient's clinical history and response to the antibody, and the discretion of the attending physician.

[0326] Depending on the type and severity of the disease, about 1 .mu.g/kg to 150 mg/kg (e.g., 0.1-20 mg/kg) of antibody is an initial candidate dosage for administration to the patient, whether, for example, by one or more separate administrations, or by continuous infusion. A typical daily dosage might range from about 1 .mu.g/kg to 100 mg/kg or more, depending on the factors mentioned above. For repeated administrations over several days or longer, depending on the condition, the treatment is sustained until a desired suppression of disease symptoms occurs. However, other dosage regimens may be useful. The progress of this therapy is easily monitored by conventional techniques and assays.

[0327] The antibody composition will be formulated, dosed and administered in a manner consistent with good medical practice. Factors for consideration in this context include the particular disorder being treated, the particular mammal being treated, the clinical condition of the individual patient, the cause of the disorder, the site of delivery of the agent, the method of administration, the scheduling of administration, and other factors known to medical practitioners.

[0328] The therapeutically effective amount of the antibody to be administered will be governed by such considerations, and is the minimum amount necessary to prevent, ameliorate, or treat a disease or disorder. The antibody need not be, but is optionally formulated with one or more agents currently used to prevent or treat the disorder in question.

[0329] Antibodies of the present invention may also be used as therapeutic reagents, to diminish or eliminate cancer or tumors. For example, the antibodies may be used on their own (for instance, to inhibit metastases) or coupled to one or more therapeutic agents. Suitable agents in this regard include radionuclides, differentiation inducers, drugs, toxins, and derivatives thereof. Preferred radionuclides include ⁹⁰Y, ¹²³I, ¹²⁵I, ¹³¹I, ¹⁸⁶Re, ¹⁸⁸Re, ²¹¹At, and ²¹²Bi. Preferred drugs include methotrexate, and pyrimidine and purine analogs. Preferred differentiation inducers include phorbol esters and butyric acid. Preferred toxins include ricin, abrin, diphtheria toxin, cholera toxin, gelonin, Pseudomonas exotoxin, Shigella toxin, and pokeweed antiviral protein

[0330] A therapeutic agent may be coupled (e.g., covalently bonded) to a suitable monoclonal antibody either directly or indirectly (e.g., via a linker group). A direct reaction between an agent and an antibody is possible when each possesses a substituent capable of reacting with the other. For example, a nucleophilic group, such as an amino or sulfhydryl group, on one may be capable of reacting with a carbonyl-containing group, such as an anhydride or an acid halide, or with an alkyl group containing a good leaving group (e.g., a halide) on the other.

[0331] Alternatively, it may be desirable to couple a therapeutic agent and an antibody via a linker group. A linker group can function as a spacer to distance an antibody from an agent in order to avoid interference with binding capabilities. A linker group can also serve to increase the chemical reactivity of a substituent on an agent or an antibody, and thus increase the coupling efficiency. An increase in chemical reactivity may also facilitate the use of agents, or functional groups on agents, which otherwise would not be possible.

[0332] It will be evident to those skilled in the art that a variety of bifunctional or polyfunctional reagents, both homo- and hetero-functional (such as those described in the catalog of the Pierce Chemical Co., Rockford, Ill.), may be employed as the linker group. Coupling may be affected, for example, through amino groups, carboxyl groups, sulfhydryl groups or oxidized carbohydrate residues. There are numerous references describing such methodology, e.g. U.S. Pat. No. 4,671,958, to Rodwell et al.

[0333] Where a therapeutic agent is more potent when free from the antibody portion of the immunoconjugates of the present invention, it may be desirable to use a linker group which is cleavable during or upon internalization into a cell. A number of different cleavable linker groups have been described. The mechanisms for the intracellular release of an agent from these linker groups include cleavage by reduction of a disulfide bond (e.g., U.S. Pat. No. 4,489,710, to Spitler), by irradiation of a photolabile bond (e.g., U.S. Pat. No. 4,625,014, to Senter et al.), by hydrolysis of derivatized amino acid side chains (e.g., U.S. Pat. No. 4,638,045, to Kohn et al.), by serum complement-mediated hydrolysis (e.g., U.S. Pat. No. 4,671,958, to Rodwell et al.), and acid-catalyzed hydrolysis (e.g., U.S. Pat. No. 4,569,789, to Blattler et al.).

[0334] It may be desirable to couple more than one agent to an antibody. In one embodiment, multiple molecules of an agent are coupled to one antibody molecule. In another embodiment, more than one type of agent may be coupled to one antibody. Regardless of the particular embodiment, immunoconjugates with more than one agent may be prepared in a variety of ways as described above.

[0335] While it is possible for the immunogen to be administered in a pure or substantially pure form, it is preferable to present it as a pharmaceutical composition, formulation or preparation with a carrier.

[0336] The formulations of the present invention, both for veterinary and for human use, comprise an immunogen as described above, together with one or more pharmaceutically acceptable carriers and, optionally, other therapeutic ingredients. The carrier(s) must be “acceptable” in the sense of being compatible with the other ingredients of the formulation and not deleterious to the recipient thereof. The formulations may conveniently be presented in unit dosage form and may be prepared by any method well-known in the pharmaceutical art.

[0337] Suitable pharmaceutical carriers include proteins such as albumins (e.g., U.S. Pat. No. 4,507,234, to Kato et al.), peptides and polysaccharides such as aminodextran (e.g., U.S. Pat. No. 4,699,784, to Shih et al.), or water. A carrier may also bear an agent by noncovalent bonding or by encapsulation, such as within a liposome vesicle (e.g., U.S. Pat. Nos. 4,429,008 and 4,873,088). Carriers specific for radionuclide agents include radiohalogenated small molecules and chelating compounds. For example, U.S. Pat. No. 4,735,792 discloses representative radiohalogenated small molecules and their synthesis. A radionuclide chelate may be formed from chelating compounds that include those containing nitrogen and sulfur atoms as the donor atoms for binding the metal, metal oxide, radionuclide. For example, U.S. Pat. No. 4,673,562, to Davison et al. discloses representative chelating compounds and their synthesis.

[0338] All methods include the step of bringing into association the active ingredient with the carrier, which constitutes one or more accessory ingredients. In general, the formulations are prepared by uniformly and intimately bringing into association the active ingredient with liquid carriers or finely divided solid carriers or both, and then, if necessary, shaping the product into the desired formulation.

[0339] Formulations suitable for intravenous intramuscular, subcutaneous, or intraperitoneal administration conveniently comprise sterile aqueous solutions of the active ingredient with solutions, which are preferably isotonic with the blood of the recipient. Such formulations may be conveniently prepared by dissolving solid active ingredient in water containing physiologically compatible substances such as sodium chloride (e.g. 0.1-2.0M), glycine, and the like, and having a buffered pH compatible with physiological conditions to produce an aqueous solution, and rendering said solution sterile. These may be present in unit or multi-dose containers, for example, sealed ampoules or vials.

[0340] The formulations of the present invention may incorporate a stabilizer. Illustrative stabilizers are polyethylene glycol, proteins, saccharides, amino acids, inorganic acids, and organic acids, which may be used either on their own or as admixtures. These stabilizers are preferably incorporated in an amount of 0.11-10,000 parts by weight per part by weight of immunogen. If two or more stabilizers are to be used, their total amount is preferably within the range specified above. These stabilizers are used in aqueous solutions at the appropriate concentration and pH. The specific osmotic pressure of such aqueous solutions is generally in the range of 0.1-3.0 osmoles, preferably in the range of 0.8-1.2. The pH of the aqueous solution is adjusted to be within the range of 5.0-9.0, preferably within the range of 6-8. In formulating the antibody of the present invention, anti-adsorption agent may be used.

[0341] Additional pharmaceutical methods may be employed to control the duration of action. Controlled release preparations may be achieved through the use of polymer to complex or absorb the proteins or their derivatives. The controlled delivery may be exercised by selecting appropriate macromolecules (for example polyester, polyamino acids, polyvinyl, pyrrolidone, ethylenevinylacetate, methylcellulose, carboxymethylcellulose, or protamine sulfate) and the concentration of macromolecules as well as the methods of incorporation in order to control release. Another possible method to control the duration of action by controlled-release preparations is to incorporate the PCAT antibody into particles of a polymeric material such as polyesters, polyamino acids, hydrogels, poly(lactic acid) or ethylene vinylacetate copolymers. Alternatively, instead of incorporating these agents into polymeric particles, it is possible to entrap these materials in microcapsules prepared, for example, by coacervation techniques or by interfacial polymerization, for example, hydroxymethylcellulose or gelatin-microcapsules and poly(methylmethacylate) microcapsules, respectively, or in colloidal drug delivery systems, for example, liposomes, albumin microspheres, microemulsions, nanoparticles, and nanocapsules or in macroemulsions.

[0342] When oral preparations are desired, the compositions may be combined with typical carriers, such as lactose, sucrose, starch, talc magnesium stearate, crystalline cellulose, methyl cellulose, carboxymethyl cellulose, glycerin, sodium alginate or gum arabic among others.

[0343] The therapeutic antibody may be supplied in the form of a kit, alone, or in the form of a pharmaceutical composition as described above.

### Other Immunotherapy

[0344] The PCAT proteins, peptides, or fragments thereof of this invention are also intended for use in producing antiserum designed for pre- or post-disease prophylaxis. Here the protein, peptides or fragment thereof, is formulated with a suitable adjuvant and administered by injection to human volunteers, according to known methods for producing human antisera. Antibody response to the injected proteins is monitored, during a several-week period following immunization, by periodic serum sampling to detect the presence of antiserum antibodies, using an immunoassay as described herein.

[0345] The antiserum from immunized individuals may be administered as a prophylactic measure for individuals who are at risk of developing pancreatic diseases or cancer. The antiserum is also useful in treating an individual afflicted with pancreatic diseases or cancer for post-disease prophylaxis.

[0346] Alternatively, peptides derived form the PCAT protein sequence may be modified to increase their immunogenicity by enhancing binding of the peptide to the MHC molecules in which the peptide is presented. The peptide or modified peptide may be conjugated to a carrier molecule to enhance the antigenicity of the peptide. Examples of carrier molecules, include, but are not limited to, human albumin, bovine albumin, lipoprotein and keyhole limpet hemo-cyanin (“Basic and Clinical Immunology” (1991) Stites, D. P. and Terr A. I. (eds) Appleton and Lange, Norwalk Conn., San Mateo, Calif.).

[0347] An “immunogenic peptide” is a peptide, which comprises an allele-specific motif such that the peptide will bind the MHC allele (HLA in human) and be capable of inducing a CTL (cytoxic T-lymphocytes) response. Thus, immunogenic peptides are capable of binding to an appropriate class I or II MHC molecule and inducing a cytotoxic T cell or T helper cell response against the antigen from which the immunogenic peptide is derived.

[0348] Alternatively, amino acid sequence variants of the peptide can be prepared by mutations in the DNA, which encodes the peptide, or by peptide synthesis.

[0349] At the genetic level, these variants ordinarily are prepared by site-directed mutagenesis of nucleotides in the DNA encoding the peptide molecule, thereby producing DNA encoding the variant, and thereafter expressing the DNA in recombinant cell culture. The variants typically exhibit the same qualitative biological activity as the nonvariant peptide.

[0350] T-lymphocytes recognize antigen in association with Class I or Class II MHC molecules in the form of a peptide fragment bound to an MHC molecule. The degree of peptide binding to a given MHC allele is based on amino acids at particular positions within the peptide (Parker et al. (1992) Journal of Immunology 149:3580; Kubo, et al. (1994) Journal of Immunology 52:3913-3924; Ruppert J. et al. (1993) Cell 74:929-937; Falk et al. (1991) Nature 351:290-296). The peptides of the present invention are useful as an epitope for immunogenic response (see more detailed description below).

[0351] In human, MHC is called HLA, wherein class I molecules are encoded by the HLA-A, B, and C loci. HLA-A and B antigens are expressed at the cell surface at approximately equal densities, whereas the expression of HLA-C is significantly lower (about 10-fold lower). Each of these loci has a number of alleles. MHC class II molecules are encoded by three pairs of MHC II alpha- and beta-chain genes, called HLA DR, -DP, and -DQ in human. In many haplotypes the HLA-DR cluster contains an extra beta-chain gene whose product can pair with the DR alpha chain. Each MHC class I and II molecule binds a different rage of peptides. The present of several loci means that any one individual is equipped to present a much broader ranger of different peptides than if only one MHC protein of each class were expressed at the cell surface. The peptide binding motifs of the present invention are designed to be specific for each allelic subtype.

[0352] The peptides of the present invention are used for treatment of the pancreatic diseases. Treatment involves administration of the protective composition after the appearance of the disease.

[0353] The present invention is also applied to prevent and suppress the disease. It is not always possible to distinguish between “preventing” and “suppressing” since the ultimate inductive event or events may be unknown, latent, or the patient is not ascertained until well after the occurrence of the event or events. Therefore, it is common to use the term “prophylaxis” as distinct from “treatment” to encompass both “preventing” and “suppressing” as defined herein. The term “protection,” as used herein, is meant to include “prophylaxis.”

[0354] The peptides are used for treating T cell-mediated pathology. The term “T cell-mediated pathology” refers to any condition in which an inappropriate T cell response is a component of the pathology. The term is intended to encompass both T cell mediated pancreatic diseases and diseases resulting from unregulated clonal T cell replication.

[0355] Therefore, the present invention relates to peptides or modified peptides derived from the protein sequences of the PCAT proteins that differentially expressed in the pancreatic diseases. By way of example, modification may include substitution, deletion or addition of an amino acid in the given immunogenic peptide sequence or mutation of existing amino acids within the given immunogenic peptide sequence, or derivatization of existing amino acids within the given immunogenic peptide sequence. Any amino acid comprising the immunogenic peptide sequence may be modified in accordance with this invention. In one aspect, at least one amino acid is substituted or replaced within the given immunogenic peptide sequence. Any amino acid may be used to substitute or replace a given amino acid within the immunogenic peptide sequence. Modified peptides are intended to include any immunogenic peptide obtained from differentially expressed proteins, which has been modified and exhibits enhanced binding to the MHC molecule with which it associates when presented to the T-cell. These modified peptides may be synthetically or recombinantly produced by conventional methods.

[0356] In another embodiment, the peptides of the present invention comprise, or consisting sequences of about 5-8, 8-10, 10-15 or 15-30 amino acids which are immunogenic, that is, capable of inducing an immune response when injected into a subject.

[0357] The recombinant or natural protein, peptides, or fragment thereof of PCAT, or modified peptides, may be used as a vaccine either prophylactically or therapeutically. When provided prophylactically the vaccine is provided in advance of any evidence of pancreatic diseases, particularly, cancer. The prophylactic administration of the pancreatic disease vaccine should serve to prevent or attenuate pancreatic diseases, preferably cancer, in a mammal.

[0358] Preparation of vaccine is using recombinant protein or peptide expression vectors comprising all or part of nucleic acid sequence of PCAT proteins encoding peptides. Examples of vectors that may be used in the aforementioned vaccines include, but are not limited to, defective retroviral vectors, adenoviral vectors vaccinia viral vectors, fowl pox viral vectors, or other viral vectors (Mulligan, R. C., (1993) Science 260:926-932). The viral vectors carrying all or part of nucleic sequence of SEQ ID NOS: 289-702 can be introduced into a mammal either prior to any evidence of pancreatic diseases or to mediate regression of the disease in a mammal afflicted with pancreatic diseases. Examples of methods for administering the viral vector into the mammals include, but are not limited to, exposure of cells to the virus ex vivo, or injection of the retrovirus or a producer cell line of the virus into the affected tissue or intravenous administration of the virus. Alternatively the viral vector carrying all or part of the PCAT nucleic acid sequence that encode peptides may be administered locally by direct injection into the cancer lesion or topical application in a pharmaceutically acceptable carrier. The quantity of viral vector, carrying all or part of the PCAT nucleic acid sequence, to be administered is based on the titer of virus particles. A preferred range of the immunogen to be administered may be about 106 to about 1011 virus particles per mammal, preferably a human. After immunization the efficacy of the vaccine can be assessed by production of antibodies or immune cells that recognize the antigen, as assessed by specific lytic activity or specific cytokine production or by tumor regression. One skilled in the art would know the conventional methods to assess the aforementioned parameters. If the mammal to be immunized is already afflicted with cancer, the vaccine can be administered in conjunction with other therapeutic treatments. Examples of other therapeutic treatments includes, but are not limited to, adoptive T cell immunotherapy, coadministration of cytokines or other therapeutic drugs for cancer.

[0359] Alternatively all or parts thereof of a substantially or partially purified the PCAT proteins or their peptides may be administered as a vaccine in a pharmaceutically acceptable carrier. Ranges of the protein that may be administered are about 0.001 to about 100 mg per patient, preferred doses are about 0.01 to about 100 mg per patient. In a preferred embodiment, the peptides or modified peptides thereof is administered therapeutically or prophylactically to a mammal in need of such treatment. The peptide may be synthetically or recombinantly produced. Immunization is repeated as necessary, until a sufficient titer of anti-immunogen antibody or immune cells has been obtained.

[0360] In yet another alternative embodiment a viral vector, such as a retroviral vector, can be introduced into mammalian cells. Examples of mammalian cells into which the retroviral vector can be introduced include, but are not limited to, primary mammalian cultures or continuous mammalian cultures, COS cells, NIH3T3, or 293 cells (ATTC #CRL 1573), dendritic cells. The means by which the vector carrying the gene may be introduced into a cell includes, but is not limited to, microinjection, electroporation, transfection or transfection using DEAE dextran, lipofection, calcium phosphate or other procedures known to one skilled in the art (Sambrook et al. (EDS) (2001) in “Molecular Cloning. A laboratory manual”, Cold Spring Harbor Press Plainview, N.Y.).

[0361] The vaccine formulation of the present invention comprises an immunogen that induces an immune response directed against the cancer associated antigens such as the PCATs, and in nonhuman primates and finally in humans. The safety of the immunization procedures is determined by looking for the effect of immunization on the general health of the immunized animal (weight change, fever, appetite behavior etc.) and looking for pathological changes on autopsies. After initial testing in animals, cancer patients can be tested. Conventional methods would be used to evaluate the immune response of the patient to determine the efficiency of the vaccine.

[0362] Measurement of candidate disease tumor antigen or vaccine expression in patients is the first step of the present invention. Subsequent steps will focus on measuring immune responses to these candidate antigens or vaccine. Sera from disease patients, particularly cancer patients, and healthy donors will be screened for antibodies to the candidate antigens as well as for levels of circulating tumor derived antigens. antigen. The vaccine formulations may be evaluated first in animal models, initially rodents

[0363] In one embodiment mammals, preferably human, at high risk for pancreatic diseases, particularly cancer, are prophylactically treated with the vaccines of this invention. Examples of such mammals include, but are not limited to, humans with a family history of pancreatic diseases, humans with a history of pancreatic diseases, particular cancer, or humans afflicted with pancreatic cancer previously resected and therefore at risk for reoccurrence. When provided therapeutically, the vaccine is provided to enhance the patient's own immune response to the diseased antigen present on the pancreatic diseases or advanced stage of pancreatic diseases. The vaccine, which acts as an immunogen, may be a cell, cell lysate from cells transfected with a recombinant expression vector, cell lysates from cells transfected with a recombinant expression vector, or a culture supernatant containing the expressed protein. Alternatively, the immunogen is a partially or substantially purified recombinant protein, peptide or analog thereof or modified peptides or analogs thereof. The proteins or peptides may be conjugated with lipoprotein or administered in liposomal form or with adjuvant.

[0364] While it is possible for the immunogen to be administered in a pure or substantially pure form, it is preferable to present it as a pharmaceutical composition, formulation or preparation. The formulations of the present invention are described in the previous section.

[0365] Vaccination can be conducted by conventional methods. For example, the immunogen can be used in a suitable diluent such as saline or water, or complete or incomplete adjuvants. Further, the immunogen may or may not be bound to a carrier to make the protein immunogenic. Examples of such carrier molecules include but are not limited to bovine serum albumin (BSA), keyhole limpet hemocyanin (KLH), tetanus toxoid, and the like. The immunogen also may be coupled with lipoproteins or administered in liposomal form or with adjuvants. The immunogen can be administered by any route-appropriate for antibody production such as intravenous, intraperitoneal, intramuscular, subcutaneous, and the like. The immunogen may be administered once or at periodic intervals until a significant titer of anti-PCAT immune cells or anti-PCAT antibody is produced. The presence of anti-PCAT immune cells may be assessed by measuring the frequency of precursor CTL (cytoxic T-lymphocytes) against PCAT antigen prior to and after immunization by a CTL precursor analysis assay (Coulie, P. et al., (1992) International Journal Of Cancer 50:289-297). The antibody may be detected in the serum using the immunoassay described above.

[0366] The safety of the immunization procedures is determined by looking for the effect of immunization on the general health of the immunized animal (weight change, fever, appetite behavior etc.) and looking for pathological changes on autopsies. After initial testing in animals, pancreatic diseases in patients can be tested. Conventional methods would be used to evaluate the immune response of the patient to determine the efficiency of the vaccine.

[0367] In yet another embodiment of this invention all, part, or parts of the PCAT proteins or peptides or fragments thereof, or modified peptides, may be exposed to dendritic cells cultured in vitro. The cultured dendritic cells provide a means of producing T-cell dependent antigens comprised of dendritic cell modified antigen or dendritic cells pulsed with antigen, in which the antigen is processed and expressed on the antigen activated dendritic cell. The PCAT antigen activated dendritic cells or processed dendritic cell antigens may be used as immunogens for vaccines or for the treatment of pancreatic diseases, particularly pancreatic cancer. The dendritic cells should be exposed to antigen for sufficient time to allow the antigens to be internalized and presented on the dendritic cells surface. The resulting dendritic cells or the dendritic cell process antigens can than be administered to an individual in need of therapy. Such methods are described in Steinman et al. (WO93/208185) and in Banchereau et al. (EPO Application 0563485A1).

[0368] In yet another aspect of this invention T-cells isolated from individuals can be exposed to the PCAT proteins, peptides or fragments thereof, or modified peptides in vitro and then administered to a patient in need of such treatment in a therapeutically effective amount. Examples of where T-lymphocytes can be isolated include but are not limited to, peripheral blood cells lymphocytes (PBL), lymph nodes, or tumor infiltrating lymphocytes (TIL). Such lymphocytes can be isolated from the individual to be treated or from a donor by methods known in the art and cultured in vitro (Kawakami, Y. et al. (1989) J. Immunol. 142: 2453-3461). Lymphocytes are cultured in media such as RPMI or RPMI 1640 or AIM V for 1-10 weeks. Viability is assessed by trypan blue dye exclusion assay. Examples of how these sensitized T-cells can be administered to the mammal include but are not limited to, intravenously, intraperitoneally or intralesionally. Parameters that may be assessed to determine the efficacy of these sensitized T-lymphocytes include, but are not limited to, production of immune cells in the mammal being treated or tumor regression. Conventional methods are used to assess these parameters. Such treatment can be given in conjunction with cytokines or gene modified cells (Rosenberg, S. A. et al. (1992) Human Gene Therapy, 3: 75-90; Rosenberg, S. A. et al. (1992) Human Gene Therapy, 3: 57-73).

[0369] The present invention is further described by the following example. The example is provided solely to illustrate the invention by reference to specific embodiments. This exemplification, while illustrating certain aspects of the invention, does not offer the limitations or circumscribe the scope of the disclosed invention.

[0370] All examples outlined here were carried out using standard techniques, which are well known and routine to those of skill in the art. Routine molecular biology techniques of the following example can be carried out as described in standard laboratory manuals, such as Sambrook et al., Molecular Cloning: A laboratory Manual, 3^{rd} Ed.; Cold Spring Harbor Laboratory, Cold Spring Harbor, N.Y. (2001).

### Working Examples

### 1. Pancreatic Cell Line Model System

[0371] Analysis of gene expression in various pancreatic cancer cell lines as well as pancreatic duct epithelial tissue has shown that the cell line Hs766T correlates well with normal tissue. For this reason, this cell line is reported in the literature as being a good surrogate for normal tissue in analyses of differential expression between pancreatic adenocarcinoma (and derived tumor lines) and normal tissue (or surrogate, Hs766T). The model system employed here involves the use of Hs766T as a “normal” reference to which cell surface expression in tumor derived cell lines is compared. These differentials or candidates are then validated in tissues, pancreatic cancer and normal pancreas, to confirm that they are differentially expressed between these tissues as well as within the cell line model system. Details of the pancreatic tumor lines that were used for this study, as well as the pancreatic line Hs766T are provided below.

TABLE 3
Cell Lines and Media

| | | | | Non- | | | | Fetal |
|---|---|---|---|---|---|---|---|---|
| | ATCC | Base | | essential | Sodium | Sodium | | Bovine |
| Cell line | Reference | medium | Glutamine | amino acids | Carbonate | Pyruvate | Hepes | Serum |
| Panc-1 | CRL-1469 | DMEM | 2 mM | 1% (w/v) | 0.1% (w/v) | 1 mM | | 10% (v/v) |
| Hs766t | HTB-134 | DMEM | 2 mM | 1% (w/v) | 0.1% (w/v) | 1 mM | | 10% (v/v) |
| SU.86.86 | CRL-1837 | DMEM | 2 mM | 1% (w/v) | 0.1% (w/v) | 1 mM | | 10% (v/v) |
| AsPC1 | CRL-1682 | RPMI | 2 mM | 1% (w/v) | 0.1% (w/v) | 1 mM | 10 mM | 20% (v/v) |
| HPAF II | CRL-1997 | DMEM | 2 mM | 1% (w/v) | 0.1% (w/v) | 1 mM | | 10% (v/v) |
| HPAC | CRL-2119 | DMEM | 2 mM | 1% (w/v) | 0.1% (w/v) | 1 mM | | 10% (v/v) |
| Mia-Paca-2 | CRL-1420 | DMEM | 2 mM | 1% (w/v) | 0.1% (w/v) | 1 mM | | 10% (v/v) |
| Mpanc-96 | CRL-2380 | RPMI | 2 mM | 1% (w/v) | 0.1% (w/v) | 1 mM | 10 mM | 10% (v/v) |
| BxPC-3 | CRL-1687 | RPMI | 2 mM | 1% (w/v) | 0.1% (w/v) | 1 mM | 10 mM | 10% (v/v) |
| Capan-2 | HTB-80 | DMEM | 2 mM | 1% (w/v) | 0.1% (w/v) | 1 mM | | 10% (v/v) |

### Pancreatic Cancer Cell Line Culture

[0372] Cell lines were grown in a culturing medium that is supplemented as necessary with growth factors and serum (as described in Table 3). Cultures were established from frozen stocks in which the cells were suspended in a freezing medium (cell culture medium with 10% DMSO [v/v]) and flash frozen in liquid nitrogen. Frozen stocks prepared in this way were stored in the liquid nitrogen vapour. Cell cultures were established by rapidly thawing frozen stocks at 37° C. Thawed stock cultures were slowly transferred to a culture vessel containing a large volume of culture medium that was supplemented. For maintenance of culture, cells were seeded at 1×10⁵ cells/per ml in medium and incubated at 37° C. until confluence of cells in the culture vessel exceeds 50% by area. At this time, cells were harvested from the culture vessel using enzymes or EDTA where necessary. The density of harvested, viable cells was estimated by hemocytometry and the culture reseeded as above. A passage of this nature was repeated no more than 25 times at which point the culture was destroyed and reestablished from frozen stocks as described above.

[0373] For the analyses of cell surface protein expression in cultured cell lines cells were grown as described above. At a period 24 h prior to the experiment, the cell line was passaged as described above. This yielded cell densities that were <50% confluent and growing exponentially. Typically, triplicate analyses of differential expression were performed for each line relative to Hs766T for the purpose of identifying statistically significant reproducible differentially expressed proteins.

### 2. Cloning and Expression of Target Proteins

[0374] cDNA Retrieval

[0375] Peptide sequences were searched by BlastP against the Celera Discovery System (CDS) and public database to identify the corresponding full-length open reading frames (ORFs). Each ORF sequence was then searched by BlastN against the Celera in-house human cDNA clone collection. For each sequence of interest, up to three clones were pulled and streaked onto LB/Ampicillin (100 ug/ml) plates. Plasmid DNA was isolated using Qiagen spin mini-prep kit and verified by restriction digest. Subsequently, the isolated plasmid DNA was sequence verified against the ORF reference sequence. Sequencing reactions were carried out using Applied Biosystems BigDye Terminator kit followed by ethanol precipitation. Sequence data was collected using the Applied Biosystems 3100 Genetic Analyzer and analyzed by alignment to the reference sequence using the Clone Manager alignment tool.

### PCR

[0376] PCR primers were designed to amplify the full-length ORF as well as any regions of the ORF that were interest for expression (antigenic or hydrophilic regions as determined by the Clone Manager sequence analysis tool). Primers also contained 5′ and 3′ overhangs to facilitate cloning (see below). PCR reactions contained 2.5 units Platinum Taq DNA Polymerase High Fidelity (Invitrogen), 50 ng cDNA plasmid template, 1 uM forward and reverse primers, 800 uM dNTP cocktail (Applied Biosystems) and 2 mM MgSO4. After 20-30 cycles (94° C. for 30 seconds, 55° C. for 1 minutes and 73° C. for 2 minutes), product was verified and quantitated by agarose gel electrophoresis.

### Construction of Entry Clones

[0377] PCR products were cloned into an entry vector for use with the Gateway recombination based cloning system (Invitrogen). These vectors included pDonr221, pDonr201, pEntr/D-TOPO or pEntr/SD/D-TOPO and were used as described in the cloning methods below.

TOPO Cloning into pEntr/D-TOPO or pEntr/SD/D-TOPO

[0378] For cloning using this method, the forward PCR primer contained a 5′ overhang containing the sequence “CACC”. PCR products were generated as described above and cloned into the entry vector using the Invitrogen TOPO cloning kit. Reactions were typically carried out at room temperature for 10 minutes and subsequently transformed into TOP10 chemically competent cells (Invitrogen, CA). Candidate clones were picked, plasmid DNA was prepared using Qiagen spin mini-prep kit and screened using restriction digest. Inserts were subsequently sequence verified as described above.

Gateway Cloning into pDonr201 or pDonr221

[0379] For cloning using this method, PCR primers contained the following overhangs:

Forward 5′ overhang:
(SEQ ID NO: 874)
5′-GGGGACAAGTTTGTACAAAAAAGCAGGCTTC-3′
Reverse 5' overhang:
(SEQ ID NO: 875)
5′-GGGGACCACTTTGTACAAGAAAGCTGGGT-3′

[0380] PCR products were generated as described above. ORFs were recombined into the entry vector using the Invitrogen Gateway BP Clonase enzyme mix. Reactions were typically carried out at 25° C. for 1 hour, treated with Proteinase K at 37° C. for 10 minutes and transformed into Library Efficiency DH5α chemically competent cells (Invitrogen, CA). Candidate clones were picked, plasmid DNA was prepared using Qiagen spin mini-prep kit and screened using restriction digest. Inserts were subsequently sequence verified as described above.

### Construction of Expression Clones

[0381] ORFs were transferred from the entry construct into a series of expression vectors using the Gateway LR Clonase enzyme mix. Reactions were typically carried out for 1 hour at 25° C., treated with Proteinase K at 37° C. for 10 minutes and subsequently transformed into Library Efficiency DH5α chemically competent cells (Invitrogen). Candidate clones were picked, plasmid DNA was prepared using Qiagen spin mini-prep kit and screened using restriction digest. Expression vectors included but were not limited to pDest14, pDest15, pDest17, pDest8, pDest10 and pDest20. These vectors allow expression in systems such as E. coli and recombinant baculovirus. Other vectors not listed here allow expression in yeast, mammalian cells, or in vitro.

Expression of Recombinant Proteins in E. coli

[0382] Constructs were transformed into one or more of the following host strains: BL21 SI, BL21 AI, (Invitrogen); Origami B (DE3), Origami B (DE3) pLysS, Rosetta (DE3), Rosetta (DE3) pLysS, Rosetta-Gami (DE3), Rosetta-Gami (DE3) pLysS, or Rosetta-Gami B (DE3) pLysS (Novagen). The transformants were grown in LB with or without NaCl and with appropriate antibiotics, at temperatures in the range of 20-37° C., with aeration. Expression was induced with the addition of IPTG (0.03-0.3 mM) or NaCl (75-300 mM) when the cells were in mid-log growth. Growth was continued for one to 24 hours post-induction. Cells were harvested by centrifugation in a Sorvall RC-3C centrifuge in a H6000A rotor for 10 minutes at 3000 rpm, at 4° C. Cell pellets were stored at −80° C.

### Expression of Recombinant Proteins Using Baculovirus

[0383] Recombinant proteins were expressed using baculovirus in Sf21 fall army worm ovarian cells. Recombinant baculoviruses were prepared using the Bac-to-Bac system (Invitrogen) per the manufacturer's instructions. Proteins were expressed on the large scale in Sf90011 serum-free medium (Invitrogen) in a 10 L bioreactor tank (27° C., 130 rpm, 50% dissolved oxygen for 48 hours).

### 3. Recombinant Protein Purification

[0384] Recombinant proteins were purified from E. coli and/or insect cells using a variety of standard chromatography methods. Briefly, cells were lysed using sonication or detergents. The insoluble material was pelleted by centrifugation at 10,000×g for 15 minutes. The supernatant was applied to an appropriate affinity column, e.g. His-tagged proteins were separated using a pre-packed chelating sepharose column (Pharmacia) or GST-tagged proteins were separated using a glutathione sepharose column (Pharmacia). After using the affinity column, proteins were further separated using various techniques, such as ion exchange chromatography (columns from Pharmacia) to separate on the basis of electrical charge or size exclusion chromatography (columns from Tosohaas) to separate on the basis of molecular weight, size and shape.

[0385] Expression and purification of the protein are also achieved using either a mammalian cell expression system or an insect cell expression system. The pUB6/V5-His vector system (Invitrogen, CA) is used to express GSCC in CHO cells. The vector contains the selectable bsd gene, multiple cloning sites, the promoter/enhancer sequence from the human ubiquitin C gene, a C-terminal V5 epitope for antibody detection with anti-V5 antibodies, and a C-terminal polyhistidine (6.times.His) sequence for rapid purification on PROBOND resin (Invitrogen, CA). Transformed cells are selected on media containing blasticidin.

[0386] Spodoptera frugiperda (Sf9) insect cells are infected with recombinant Autographica californica nuclear polyhedrosis virus (baculovirus). The polyhedrin gene is replaced with the cDNA by homologous recombination and the polyhedrin promoter drives cDNA transcription. The protein is synthesized as a fusion protein with 6×his, which enables purification as described above. Purified protein is used in the following activity and to make antibodies

### 4. Chemical Synthesis of Peptides

[0387] Proteins or portions thereof may be produced not only by recombinant methods, but also by using chemical methods well known in the art. Solid phase peptide synthesis may be carried out in a batchwise or continuous flow process, which sequentially adds .alpha.-amino- and side chain-protected amino acid residues to an insoluble polymeric support via a linker group. A linker group such as methylamine-derivatized polyethylene glycol is attached to poly(styrene-co-divinylbenzene) to form the support resin. The amino acid residues are N-a-protected by acid labile Boc (t-butyloxycarbonyl) or base-labile Fmoc (9-fluorenylmethoxycarbonyl). The carboxyl group of the protected amino acid is coupled to the amine of the linker group to anchor the residue to the solid phase support resin. Trifluoroacetic acid or piperidine are used to remove the protecting group in the case of Boc or Fmoc, respectively. Each additional amino acid is added to the anchored residue using a coupling agent or pre-activated amino acid derivative, and the resin is washed. The full length peptide is synthesized by sequential deprotection, coupling of derivitized amino acids, and washing with dichloromethane and/or N,N-dimethylformamide. The peptide is cleaved between the peptide carboxy terminus and the linker group to yield a peptide acid or amide. (Novabiochem 1997/98 Catalog and Peptide Synthesis Handbook, San Diego Calif. pp. S1-S20). Automated synthesis may also be carried out on machines such as the 431A peptide synthesizer (ABI). A protein or portion thereof may be purified by preparative high performance liquid chromatography and its composition confirmed by amino acid analysis or by sequencing (Creighton (1984) Proteins, Structures and Molecular Properties, W H Freeman, New York N.Y.).

### 5. Antibody Development

### Polyclonal Antibody Preparations:

[0388] Polyclonal antibodies against recombinant proteins were raised in rabbits (Green Mountain Antibodies, Burlington, Vt.). Briefly, two New Zealand rabbits were immunized with 0.1 mg of antigen in complete Freund's adjuvant. Subsequent immunizations were carried out using 0.05 mg of antigen in incomplete Freund's adjuvant at days 14, 21 and 49. Bleeds were collected and screened for recognition of the antigen by solid phase ELISA and western blot analysis. The IgG fraction was separated by centrifugation at 20,000×g for 20 minutes followed by a 50% ammonium sulfate cut. The pelleted protein was resuspended in 5 mM Tris and separated by ion exchange chromatography. Fractions were pooled based on IgG content. Antigen-specific antibody was affinity purified using Pierce AminoLink resin coupled to the appropriate antigen.

Isolation of Antibody Fragments Directed Against PCATs from a Library of scFvs

[0389] Naturally occurring V-genes isolated from human PBLs are constructed into a library of antibody fragments which contain reactivities against PCAT to which the donor may or may not have been exposed (see e.g., U.S. Pat. No. 5,885,793 incorporated herein by reference in its entirety).

[0390] Rescue of the Library: A library of scFvs is constructed from the RNA of human PBLs as described in PCT publication WO 92/01047. To rescue phage displaying antibody fragments, approximately 109 E. coli harboring the phagemid are used to inoculate 50 ml of 2×TY containing 1% glucose and 100 .mu.g/ml of ampicillin (2.times.TY-AMP-GLU) and grown to an O.D. of 0.8 with shaking. Five ml of this culture is used to inoculate 50 ml of 2.times.TY-AMP-GLU, 2×108 TU of delta gene 3 helper (M13 delta gene III, see PCT publication WO 92/01047) are added and the culture incubated at 37° C. for 45 minutes without shaking and then at 37° C. for 45 minutes with shaking. The culture is centrifuged at 4000 r.p.m. for 10 min. and the pellet resuspended in 2 liters of 2×TY containing 100 .mu.g/ml ampicillin and 50 ug/ml kanamycin and grown overnight. Phage are prepared as described in PCT publication WO 92/01047.

[0391] M13 delta gene III is prepared as follows: M13 delta gene III helper phage does not encode gene III protein, hence the phage(mid) displaying antibody fragments have a greater avidity of binding to antigen. Infectious M13 delta gene III particles are made by growing the helper phage in cells harboring a pUC19 derivative supplying the wild type gene III protein during phage morphogenesis. The culture is incubated for 1 hour at 37° C. without shaking and then for a further hour at 37° C. with shaking. Cells are spun down (IEC-Centra 8,400 r.p.m. for 10 min), resuspended in 300 ml 2×TY broth containing 100 .mu.g ampicillin/ml and 25 .mu.g kanamycin/ml (2×TY-AMP-KAN) and grown overnight, shaking at 37° C. Phagre particles are purified and concentrated from the culture medium by two PEG-precipitations (Sambrook et al., 2001), resuspended in 2 ml PBS and passed through a 0.45 .mu.m filter (MINISART NML; Sartorius) to give a final concentration of approximately 1013 transducing units/ml (ampicillin-resistant clones).

[0392] Panning of the Library: Immunotubes (Nunc) are coated overnight in PBS with 4 ml of either 100 .mu.g/ml or 10 .mu.g/ml of a polypeptide of the present invention. Tubes are blocked with 2% Marvel-PBS for 2 hours at 37° C. and then washed 3 times in PBS. Approximately 1013 TU of phage is applied to the tube and incubated for 30 minutes at room temperature tumbling on an over and under turntable and then left to stand for another 1.5 hours. Tubes are washed 10 times with PBS 0.1% Tween-20 and 10 times with PBS. Phage are eluted by adding 1 ml of 100 mM triethylamine and rotating 15 minutes on an under and over turntable after which the solution is immediately neutralized with 0.5 ml of 1.0M Tris-HCl, pH 7.4. Phages are then used to infect 10 ml of mid-log E. coli TG1 by incubating eluted phage with bacteria for 30 minutes at 37° C. The E. coli are then plated on TYE plates containing 1% glucose and 100 .mu.g/ml ampicillin. The resulting bacterial library is then rescued with delta gene 3 helper phage as described above to prepare phage for a subsequent round of selection. This process is then repeated for a total of 4 rounds of affinity purification with tube-washing increased to 20 times with PBS, 0.1% Tween-20 and 20 times with PBS for rounds 3 and 4.

[0393] Characterization of Binders: Eluted phage from the 3rd and 4th rounds of selection are used to infect E. coli HB 2151 and soluble scFv is produced (Marks, et al., 1991) from single colonies for assay. ELISAs are performed with microtitre plates coated with either 10 .mu.g/ml of the polypeptide of the present invention in 50 mM bicarbonate pH 9.6. Clones positive in ELISA are further characterized by PCR fingerprinting (see, e.g., PCT publication WO 92/01047) and then by sequencing.

### Monoclonal Antibody Generation

[0394] i) Materials:

[0395] 1) Complete Media No Sera (CMNS) for washing of the myeloma and spleen cells; Hybridoma medium CM-HAT {Cell Mab (BD), 10% FBS (or HS); 5% Origen HCF (hybridoma cloning factor) containing 4 mM L-glutamine and antibiotics} to be used for plating hybridomas after the fusion.

[0396] 2) Hybridoma medium CM-HT (NO AMINOPTERIN) (Cell Mab (BD), 10% FBS 5% Origen HCF containing 4 mM L-glutamine and antibiotics) to be used for fusion maintenance are stored in the refrigerator at 4-6° C. The fusions are fed on days 4, 8, and 12, and subsequent passages. Inactivated and pre-filtered commercial Fetal Bovine serum (FBS) or Horse Serum (HS) are thawed and stored in the refrigerator at 4° C. and must be pretested for myeloma growth from single cells.

[0397] 3) The L-glutamine (200 mM, 100× solution), which is stored at −20° C. freezer, is thawed and warmed until completely in solution. The L-glutamin is dispensed into media to supplement growth. L-glutamin is added to 2 mM for myelomas, and 4 mM for hybridoma media. Further the Penicillin, Streptomycin, Amphotericin (antibacterial-antifungal stored at −20° C.) is thawed and added to Cell Mab Media to 1%.

[0398] 4) Myeloma growth media is Cell Mab Media (Cell Mab Media, Quantum Yield from BD is stored in the refrigerator at 4° C. in the dark) which are added L-glutamine to 2 mM and antibiotic/antimycotic solution to 1% and is called CMNS.

[0399] 5) 1 bottle of PEG 1500 in Hepes (Roche, N.J.)

[0400] 6) 8-Azaguanine is stored as the dried powder supplied by SIGMA at −700° C. until needed. Reconstitute 1 vial/500 ml of media and add entire contents to 500 ml media (eg. 2 vials/litre).

[0401] 7) Myeloma Media is CM which has 10% FBS (or HS) and 8-Aza (1×) stored in the refrigerator at 4° C.

[0402] 8) Clonal cell medium D (Stemcell, Vancouver) contains HAT and methyl cellulose for semi-solid direct cloning from the fusion.

[0403] 9) Hybridoma supplements HT [hypoxanthine, thymidine] are to be used in medium for the section of hybridomas and maintenance of hybridomas through the cloning stages respectively.

[0404] 10) Origen HCF can be obtained directly from Igen and is a cell supernatant produced from a macrophage-like cell-line. It can be thawed and aliqouted to 15 ml tubes at 5 ml per tube and stored frozen at −20° C. Positive Hybridomas are fed HCF through the first subcloning and are gradually weaned. It is not necessary to continue to supplement unless you have a particularly difficult hybridoma clone. This and other additives have been shown to be more effective in promoting new hybridoma growth than conventional feeder layers.

[0405] ii) Procedure

[0406] To generate monoclonal antibodies, mice are immunized with 5-50 ug of antigen either intra-peritoneally (i.p.) or by intravenous injection in the tail vein (i.v.). Typically, the antigen used is a recombinant protein that is generated as described above. The primary immunization takes place 2 months prior to the harvesting of splenocytes from the mouse and the immunization is typically boosted by i.v. injection of 5-50 ug of antigen every two weeks. At least one week prior to expected fusion date, a fresh vial of myeloma cells is thawed and cultured. Several flasks at different densities are maintained in order that a culture at the optimum density is ensured at the time of fusion. The optimum density is determined to be 3-6×10⁵ cells/ml. Two to five days before the scheduled fusion, a final immunization is administered of ˜5 ug of antigen in PBS i.p. or i.v.

[0407] Myeloma cells are washed with 30 ml serum free media by centrifugation at 500×g at 4° C. for 5 minutes. Viable cell density is determined in resuspended cells using hemocytometry and vital stains. Cells resuspended in complete growth medium are stored at 37° C. during the preparation of splenocytes. Meanwhile, to test aminopterin sensitivity, 1×10⁶ myeloma cells are transferred to a 15 ml conical tube and centrifuged at 500 g at 4° C. for 5 minutes. The resulting pellet is resuspended in 15 ml of HAT media and cells plated at 2 drops/well on a 96 well plate.

[0408] To prepare splenocytes from immunized mice, the animals are euthanised and submerged in 70% EtOH. Under sterile conditions, the spleen is surgically removed and placed in 10 ml of RPMI medium supplemented with 20% fetal calf serum in a Petri dish. Cells are extricated from the spleen by infusing the organ with medium >50 times using a 21 g syringe.

[0409] Cells are harvested and washed by centrifugation (at 500×g at 4° C. for 5 minutes) with 30 ml of medium. Cells are resuspended in 10 ml of medium and the density of viable cells determined by hemocytometry using vital stains. The splenocytes are mixed with myeloma cells at a ratio of 5:1 (spleen cells: myeloma cells). Both the myeloma and spleen cells are washed 2 more times with 30 ml of RPMI-CMNS. Spin at 800 rpm for 12 minutes.

[0410] Supernatant is removed and cells are resuspended in 5 ml of RPMI-CMNS and are pooled to bring the volume to 30 ml and spun down as before. The cell pellet is broken up by gentle tapping and resuspended in 1 ml of BMB PEG1500 (prewarmed to 37° C.) added dropwise with 1 cc needle over 1 minute.

[0411] RPMI-CMNS is added to the PEG cells to slowly to dilute out the PEG. Cells are centrifuged and diluted in 5 ml of Complete media and 95 ml of Clonacell Medium D (HAT) media (with 5 ml of HCF). The cells are plated out at 10 ml per small petri plate.

[0412] Myeloma/HAT control is prepared as follows. Dilute about 1000 P3X63 Ag8.653 myeloma cells into 1 ml of mediu D and transfer into a single well of a 24 well plate. Plates are placed in incubator, with two plates inside of a large petri plate, with an additional petri plate full of distilled water, for 10-18 days under 5% CO2 overlay at 37° C. Clones are picked from semisolid agarose into 96 well plates containing 150-200 ul of CM-HT. Supernatants are screened 4 days later in ELISA, and positive clones are moved up to 24 well plates. Heavy growth will require changing of the media at day 8 (+/−150 ml). One should further decrease the HCF to 0.5% (gradually—2%, then 1%, then 0.5%) in the cloning plates.

[0413] For further references see Kohler G, and C. Milstein Continuous cultures of fused cells secreting antibody of predefined specificity. 1975. Nature 256: 495-497; Lane, R. D. A short duration polyethylene glycol fusion technique for increasing production of monoclonal antibody-secreting hybridomas. 1985. J. Immunol. Meth. 81:223-228;

[0414] Harlow, E. and D. Lane. Antibodies: A laboratory manual. Cold Spring Harbour Laboratory Press. 1988; Kubitz, D. The Scripps Research Institute. La Jolla. Personal Communication; Zhong, G., Berry, J. D., and Choukri, S. (1996) Mapping epitopes of Chlamydia trachomatis neutralizing monoclonal antibodies using phage random peptide libraries. J. Indust. Microbiol. Biotech. 19, 71-76; Berry, J. D., Licea, A., Popkov, M., Cortez, X., Fuller, R., Elia, M., Kerwin, L., and C. F. Barbas III. (2003) Rapid monoclonal antibody generation via dendritic cell targeting in vivo. Hybridoma and Hybridomics 22 (1), 23-31.

### 6. Expression Validation

[0415] mRNA Expression Validation by TAQMAN

[0416] Expression of mRNA was quantitated by RT-PCR using TaqMan® technology. The Taqman system couples a 5′ fluorogenic nuclease assay with PCR for real time quantitation. A probe was used to monitor the formation of the amplification product.

[0417] Total RNA was isolated from cancer model cell lines using the RNEasy Kit® (Qiagen) per manufacturer's instructions and included DNase treatment. Normal human tissue RNAs were acquired from commercial vendors (Ambion, Austin, Tex.; Stratagene, La Jolla, Calif., BioChain Institute, Newington, N.H.) as were RNAs from matched disease/normal tissues.

[0418] Target transcript sequences were identified for the differentially expressed peptides by searching the BlastP database. TaqMan assays (PCR primer/probe set) specific for those transcripts were identified by searching the Celera Discovery System™ (CDS) database. The assays were designed to span exon-exon borders and do not amplify genomic DNA.

[0419] The TaqMan primers and probe sequences were as designed by Applied Biosystems (AB) as part of the Assays on Demand™ product line or by custom design through the AB Assays by Design^{SM} service.

[0420] RT-PCR was accomplished using AmpliTaqGold and MultiScribe reverse transcriptase in the One Step RT-PCR Master Mix reagent kit (AB) according to the manufacturer's instructions. Probe and primer concentrations are 250 nM and 900 nM, respectively, in a 15 μl reaction. For each experiment, a master mix of the above components was made and aliquoted into each optical reaction well. Eight nanograms of total RNA was the template. Each sample was assayed in triplicate. Quantitative RT-PCR is performed using the ABI Prism® 7900HT Sequence Detection System (SDS). Cycling parameters follow: 48° C. for 30 min. for one cycle; 95° C. for 10 min for one cycle; 95° C. for 15 sec, 60° C. for 1 min. for 40 cycles.

[0421] The SDS software calculates the threshold cycle (C_{T}) for each reaction, and C_{T} values were used to quantitate the relative amount of starting template in the reaction. The C_{T} values for each set of three reactions were averaged for all subsequent calculations

[0422] Data were analyzed for fold differences in expression using an endogenous control for normalization, and measuring expression expressed relative to a normal tissue or normal cell line reference. The choice of endogenous control was determined empirically by testing various candidates against the cell line and tissue RNA panels and selecting the one with the least variation in expression. Relative changes in expression were quantitated using the 2^{-ΔΔCT} Method. Livak, K. J. and Schmittgen, T. D. (2001) Methods 25: 402-408; User bulletin #2: ABI Prism 7700 Sequence Detection System.

### Protein Expression Validation by Westen

[0423] Western blot analysis of target proteins was carried out using whole cell extracts prepared from each of the pancreatic cell lines. To make cell extracts, the cells were resuspended in Lysis buffer (125 mM Tris, pH 7.5, 150 mM NaCl, 2% SDS, 5 mM EDTA, 0.5% NP-40) and passed through a 20-gauge needle. Lysates were centrifuged at 5,000×g for 5 minutes at 4° C. The supernatants were collected and a protease inhibitor cocktail (Sigma) was added. The Pierce BCA assay was used to quantitate total protein. Samples were separated by SDS-PAGE and transferred to either a nitrocellulose or PVDF membrane. The Western Breeze kit from Invitrogen was used for western blot analysis. Primary antibodies were either purchased from commercially available sources or prepared using one of the methods described in Section 5. For this application, antibodies were typically diluted 1:500 to 1:10,000 in diluent buffer. Blots were developed using Pierce NBT.

### Results

[0424] Both mRNA expression and protein expression were performed and many targets were found to have a positive correlation between mRNA and protein expression relative to Hs766t. The expression of each of the targets was first analyzed in the pancreas cell line panel to show that in fact mRNA expression is also upregulated and that it correlates with the protein data obtained from the LC/MS. The exemplary targets are Muc4, Kunitz-1 protease inhibitor, Kunitz-2 protease inhibitor, Neutral amino acid transporter B(0), Transmembrane 4 superfamily member 3, KIAA 1363, Gs3786, HSPC as well as Tissue Factor.

[0425] In addition to Hs766t, mRNAs from normal pancreas tissue or other normal tissues were obtained for control. The targets listed above showed high mRNA expression in pancreatic cancer cell line. Moreover, mRNAs from pancreatic tumors were analysed and were shown to be overexpressed in target such as TM4SF3.

[0426] FIG. 4 shows the Kunitz-type 1 protease inhibitor mRNA expression in pancreatic cell lines. By using Hs766t as a control, the result shows that Kunitz-type 1 protease inhibitor is overexpressed in AsPc-1, BxPc-3, Capan-2, HPAC, HPAF-II, MPanc-96, Panc1 as well as SU 86.86. Moreover, the data is also consistent with the result from detection of the target by using LC/MS with ICAT labeling (see the method below).

[0427] FIG. 10 shows that both Gs3786 and Retinol Dehydrogenase Type II homolog were found to be over-expressed in several cell lines relative to the reference cell line Hs766t.

### Tissue Flow Cytometry Analysis

[0428] Post tissue processing, cells were sorted by flow cytometry known in the art to enrich for epithelial cells. Alternatively, cells isolated from pancreatic tissue were stained directly with EpCAM (for epithelial cells) and the specific antibody to PCAT. Cell numbers and viability were determined by PI exclusion (GUAVA) for cells isolated from both normal and tumor pancreatic tissue. A minimum of 0.5×10⁶ cells were used for each analysis. Cells were washed once with Flow Staining Buffer (0.5% BSA, 0.05% NaN3 in D-PBS). To the cells, 20 ul of each antibody for PCAT were added. An additional 5 ul of EpCAM antibody conjugated to APC were added when unsorted cells were used in the experiment. Cells were incubated with antibodies for 30 minutes at 4° C. Cells were washed once with Flow Staining Buffer and either analyzed immediately on the LSR flow cytometry apparatus or fixed in 1% formaldehyde and store at 4° C. until LSR analysis. The antibodies used to detect PCAT targets were all purchased by BD Biosciences and PE-conjugated. The isotype control antibody used for these experiments was PE-conjugated mouse IgG1k.

[0429] Tumors tissue from pancreatic cancer and from Xenograft mouse pancreatic tissues were obtained and detected via Flow Cytometry analysis. Tissue factor was shown to be overexpressed among the pancreatic tumor tissues (data not shown). Xenograft mouse was obtained by using cultured human BXPC pancreatic cells (ATCC) that were injected subcutaneously in BALB nude mouse. The pancreatic tumors were obtained from the xenograft mouse for further FACS study.

### 7. Detection and Diagnosis of PCAT by Liquid Chromatography and Mass Spectrometry (LC/MS)

[0430] The differential expression of proteins in disease and healthy samples are quantitated using Mass Spectrometry and ICAT (Isotope Coded Affinity Tag) labeling, which is known in the art. ICAT is an isotope label technique that allows for discrimination between two populations of proteins, such as a healthy and a disease sample that are pooled together for experimental purposes or two acquisitions of the same sample for classification of true sample peptides from LC/MS noise artifacts. The LC/MS spectra are collected for the labeled samples and processed using the following steps:

[0431] The raw scans from the LC/MS instrument are subjected to peak detection and noise reduction software. Filtered peak lists are then used to detect “features” corresponding to specific peptides from the original sample(s). Features are characterized by their mass/charge, charge, retention time, isotope pattern and intensity.

[0432] Similar experiments can be repeated in order to increase the confidence in detection of a peptide. These multiple acquisitions are computationally aggregated into one experiment. Experiments involving healthy and disease samples use the known effects of the ICAT label to classify the peptides as originating from a particular sample or from both samples. The intensity of a peptide present in both healthy and disease samples is used to calculate the differential expression, or relative abundance, of the peptide. The intensity of a peptide found exclusively in one sample is used to calculate a theoretical expression ratio for that peptide (singleton). Expression ratios are calculated for each peptide of each replicate of the experiment (for example, Table 1).

[0433] Statistical tests are performed to assess the robustness of the data and select statistically significant differentials. To assess general quality of the data, one: a) ensure that similar features are detected in all replicates of the experiment; b) assess the distribution of the log ratios of all peptides (a Gaussian was expected); c) calculate the overall pair wise correlations between ICAT LC/MS maps to ensure that the expression ratios for peptides are reproducible across the multiple replicates; d) aggregate multiple experiments in order to compare the expression ratio of a peptide in multiple diseases or disease samples.

### 8. Expression Validation by IHC in Tissue Sections

### Tissue Sections

[0434] Paraffin embedded, fixed tissue sections were obtained from a panel of normal tissues (Adrenal, Bladder, Lymphocytes, Bone Marrow, Breast, Cerebellum, Cerebral cortex, Colon, Endothelium, Eye, Fallopian tube, Small Intestine, Heart, Kidney [glomerulus, tubule], Liver, Lung, Testes and Thyroid) as well as 30 tumor samples with matched normal adjacent tissues from pancreas, lung, colon, prostate, ovarian and breast. In addition, other tissues are selected for testing such as bladder renal, hepatocellular, pharyngeal and gastric tumor tissues.

[0435] Esophageal replicate sections were also obtained from numerous tumor types (Bladder Cancer, Lung Cancer, Breast Cancer, Melanoma, Colon Cancer, Non-Hodgkins Lymphoma, Endometrial Cancer, Ovarian Cancer, Head and Neck Cancer, Prostate Cancer, Leukemia [ALL and CML] and Rectal Cancer). Sections were stained with hemotoxylin and eosin and histologically examined to ensure adequate representation of cell types in each tissue section.

[0436] An identical set of tissues will be obtained from frozen sections and are used in those instances where it is not possible to generate antibodies that are suitable for fixed sections. Frozen tissues do not require an antigen retrieval step.

### Paraffin Fixed Tissue Sections

[0437] Hemotoxylin and Eosin staining of paraffin embedded, fixed tissue sections. Sections were deparaffinized in 3 changes of xylene or xylene substitute for 2-5 minutes each. Sections were rinsed in 2 changes of absolute alcohol for 1-2 minutes each, in 95% alcohol for 1 minute, followed by 80% alcohol for 1 minute. Slides were washed well in running water and stained in Gill solution 3 hemotoxylin for 3 to 5 minutes. Following a vigorous wash in running water for 1 minute, sections were stained in Scott's solution for 2 minutes. Sections were washed for 1 min in running water then conterstained in Eosin solution for 2-3 minutes depending upon development of desired staining intensity. Following a brief wash in 95% alcohol, sections were dehydrated in three changes of absolute alcohol for 1 minute each and three changes of xylene or xylene substitute for 1-2 minutes each. Slides were coverslipped and stored for analysis.

### Optimisation of Antibody Staining

[0438] For each antibody, a positive and negative control sample was generated using data from the ICAT analysis of the pancreatic cancer cell lines. Cell lines were selected that are known to express low levels of a particular target as determined from the ICAT data. This cell line was the reference normal control “Hs766T”. Similarly, a pancreatic tumour line was selected that was determined to overexpress the target was selected.

### Antigen Retrieval

[0439] Sections were deparaffinized and rehydrated by washing 3 times for 5 minutes in xylene; two times for 5 minutes in 100% ethanol; two times for 5 minutes in 95% ethanol; and once for 5 minutes in 80% ethanol. Sections were then placed in endogenous blocking solution (methanol+2% hydrogen peroxide) and incubated for 20 minutes at room temperature. Sections were rinsed twice for 5 minutes each in deionized water and twice for 5 minutes in phosphate buffered saline (PBS), pH 7.4. Alternatively, where necessary sections were deparrafinized by High Energy Antigen Retrieval as follows: sections were washed three times for 5 minutes in xylene; two times for 5 minutes in 100% ethanol; two times for 5 minutes in 95% ethanol; and once for 5 minutes in 80% ethanol. Sections were placed in a Coplin jar with dilute antigen retrieval solution (10 mM citrate acid, pH 6). The Coplin jar containing slides was placed in a vessel filled with water and microwaved on high for 2-3 minutes (700 watt oven). Following cooling for 2-3 minutes, steps 3 and 4 were repeated four times (depending on tissue), followed by cooling for 20 minutes at room temperature. Sections were then rinsed in deionized water, two times for 5 minutes, placed in modified endogenous oxidation blocking solution (PBS+2% hydrogen peroxide). and rinsed for 5 minutes in PBS.

### Blocking and Staining

[0440] Sections were blocked with PBS/1% bovine serum albumin (PBA) for 1 hour at room temperature followed by incubation in normal serum diluted in PBA (2%) for 30 minutes at room temperature to reduce non-specific binding of antibody. Incubations were performed in a sealed humidity chamber to prevent air-drying of the tissue sections. (The choice of blocking serum was the same as the species of the biotinylated secondary antibody). Excess antibody is gently removed by shaking and sections covered with primary antibody diluted in PBA and incubated either at room temperature for 1 hour or overnight at 4° C. (Care was taken that the sections do not touch during incubation). Sections were rinsed twice for 5 minutes in PBS, shaking gently. Excess PBS was removed by gently shaking. The sections were covered with diluted biotinylated secondary antibody in PBA and incubated for 30 minutes to 1 hour at room temperature in the humidity chamber. If using a monoclonal primary antibody, addition of 2% rat serum was used to decrease the background on rat tissue sections. Following incubation, sections were rinsed twice for 5 minutes in PBS, shaking gently. Excess PBS was removed and sections incubated for 1 hour at room temperature in Vectastain ABC reagent (as per kit instructions). The lid of the humidity chamber was secured during all incubations to ensure a moist environment. Sections were rinsed twice for 5 minutes in PBS, shaking gently.

### Develop and Counterstain

[0441] Sections were incubated for 2 minutes in peroxidase substrate solution that was made up immediately prior to use as follows: 10 mg diaminobenzidine (DAB) dissolved in 10 ml 50 mM sodium phosphate buffer, pH 7.4; 12.5 microliters 3% CoCl₂/NiCl₂ in deionized water; 1.25 microliters hydrogen peroxide

[0442] Slides were rinsed well three times for 10 min in deionized water and counterstained with 0.01% Light Green acidified with 0.01% acetic acid for 1-2 minutes depending on intensity of counterstain desired.

[0443] Slides were rinsed three times for 5 minutes with deionized water and dehydrated two times for 2 minutes in 95% ethanol; two times for 2 minutes in 100% ethanol; and two times for 2 minutes in xylene. Stained slides were mounted for visualization by microscopy.

### Results

[0444] Tissue Factor: The protein was overexpressed in fourteen out of twenty two pancreatic tumor and two out seven pancreatic tumor metastases. In normal tissues, antibody to tissue factor or CD142 showed minimal staining. Occasional cytoplasmic staining was present in subsets of inflammatory cells, specifically lymphocytes and mast cells. Gastric chief cells showed cytoplasmic and nuclear staining. Many cell types and tissues, including urothelium, breast epithelium, respiratory epithelium, adrenal cortex, ovarian stroma, endometrial stroma, pancreatic acinar epithelium, and placental trophoblasts showed focal nuclear staining. However, in contrast to normal tissues, a number of malignancies showed significant membranous and cytoplasmic staining in malignant cells among the tumor tissues. The most prominent positivity was identified in pancreatic carcinoma, followed by prostatic carcinoma. Individual samples of colon, lung, breast and ovarian carcinoma showed positive staining. The color scale or number scale indicates the color intensity of the staining. Each number represents 100% of staining of all the tumor cells at this staining scale (see FIG. 1). In addition, CD142 (tissue factor) is overexpressed by 2 pathology grades relative to normal comparative cell type in esophageal 10%, pharyngeal 20%, gastric 10%.

[0445] Decay Accelerating Factor (DAF): The protein was overexpressed in seven out of twenty-three pancreatic tumors. The target also overexpressed in colon cancer. DAF was overexpressed by 2 pathology grades in esophageal 20%, liver 30%, gastric 30%.

[0446] Mucin 4: Mucin 4 is a transmembrane mucin composed of two subunits (a and b) generated from proteolytic cleavage, wherein a is extracellular and b is transmembrane. The b subunit contains two EGF-like domains and interacts with ErbB2 and the ErbB2/ErbB3 heterodimer with the presence of neuregulin. Interaction with ErbB2 results phosphorylation of ErbB2 and upregulation of cyclin-dependent kinase inhibitor p27kip. The intereaction causes cell cycle arrest and epithelial cell differentiation. Interaction of Mucin 4 with ErbB2/B3 results in hyperphosphorylation of the ErbB2/ErbB3/NRG heterotrimer and activation of MAPK, PI3K pathways with downregulation of p27kip. This results in the stimulation of epithelial cell proliferation. Apoptosis is repressed by expression of Mucin 4 and tumor cell growth therefore stimulated.

[0447] In normal tissues, antibody to Mucin 4 showed the most prominent positive staining in colonic epithelium and scattered individual cells within the prostatic epithelium. Additional positive cell types included pancreatic islets, urothelium, astrocytes, gastric chief cells, and subsets of renal tubular epithelial cells. Focal positivity was present in the adrenal cortex, endometrium, and testis. Rarely, inflammatory cells and single cells (neuroendocrine cells) in the intestinal epithelium were positive. Among malignancies tumor tissues, FIG. 3 showed that Mucin 4 protein is overexpressed in breast, non-small lung, prostate, ovarian and pancreatic cancers.

[0448] The Mucin 4 was overexpressed in fourteen out of twenty four pancreatic tumors and six out of eight metastatic tissues. The protein was expressed in several normal epithelia. However, both Mucin 4 and ErbB3 were overexpressed in pancreatic tumors. Mucin 4 was also overexpressed in breast cancer. In addition, Muc4 is overexpressed by 2 pathology grades in esophageal 80% (relative to gastric epithelium), renal cell carcinoma 90%, hepatocellular 20%, pharyngeal 70% (relative to gastric epithelium), gastric 20%.

[0449] ErbB3: The protein was specifically expressed in pancreatic tumor BxPC3 cell line and Breast cancer MCF7 cell line by Western analysis. Further IHC data showed that ErbB3 is overexpressed in 50% of pancreatic cancer, 30% ovarian cancer and 10% non-small cell lung cancer. Overlap of expression of Mucin 4 and ErbB3 was predominantly tumor specific where both are overexpressed.

[0450] Kunitz Inhibitor-1: the protein was overexpressed in thirteen out of twenty three pancreatic tumors and three out seven metastatic pancreatic cancer tissues. In normal tissues, antibody to Kunitz Inhibitor-1 or HAI-1 showed the most prominent positivity in placental trophoblasts. Colonic epithelium was also positive. Less intense positivity was present in urothelium and endometrial glands. Focal positivity was present in breast epithelium, respiratory epithelium, centroacinar cells in the pancreas, subsets of renal tubular epithelial cells, tonsillar epithelium, and hepatic bile ducts. However, in tumor tissues, a majority of samples of all subtypes tested showed positive staining of malignant cells. The staining was often membranous and diffused within the samples. A few samples of breast and lung cancer contained adjacent benign epithelium, which showed significantly less intense staining than the malignant cells. In pancreatic carcinoma, the level of staining in malignant cells was frequently similar to that in benign centroacinar cells, but in a few cases, the staining was less intense in malignant cells than in the adjacent benign epithelium. FIG. 2 concludes that Kunitz inhibitor-1 was overexpressed in breast, non-small cell lung, prostate, ovarian as well as pancreatic cancers. In addition, Kunitz-1 is overexpressed by 2 pathology grades in: esophageal 40%, renal cell carcinoma 40%, hepatocellular 25%, pharyngeal 30%, gastric 40%.

[0451] Transglutaminase-2 (TGM2): TGM2 protein was overexpressed in seventeen out of twenty four pancreatic tumors and seven out of seven metastatic tissues. Pathology study noted overexpression in capillary endothelium including neovascular capillaries. TGM2 protein was also overexpressed in four out of ten ovarian tumors and overexpressed in non small cell lung tumor, prostate tumor. TGM2 was overexpressed by 2 pathology grades in esophageal 10%, renal 30%, liver 10%, pharyngeal 20%, gastric 10%.

[0452] Neutral Amino Acid Transporter (ASCT2): ASCT2 protein was overexpressed in sixteen out of twenty seven pancreatic tumors (60%) and four out of seven pancreatic metastatic tissues. The protein was also overexpressed in 40% prostate cancer and 30% ovarian cancer tissues. Neutral amino acid transporter is also overexpressed by 2 pathology grades in: esophageal 10% hepatocellular 75%

[0453] CD166: CD166 protein was overexpressed in 10% pancreatic, colon and ovarian tumor, in 50% overexpressed in breast tumors.

[0454] CD46: CD46 protein was overexpressed in 10% pancreatic tumor and in 30% non-small cell lung tumors.

[0455] Kunitz Type inhibitor-2 (HAI-2): HAI-2 was overexpressed in 40% pancreatic tumors and in 10% breast and ovarian tumors.

[0456] Na/K ATPase Beta-3: Na/K ATPase Beta-3 was overexpressed in pancreatic tumor, ovarian tumor.

[0457] GS3786: GS3786 was overexpressed in pancreatic tumor and prostate tumor.

[0458] Diminuto-like: Diminuto-like protein is overexpressed (by 2 pathology grades relative to normal comparative cell type) in 20% pancreatic, 40% prostate, 20% breast and 10% colon tumors

### 9. IHC Staining of Frozen Tissue Sections

[0459] Fresh tissues are embedded carefully in OCT in plastic mold, without trapping air bubbles surrounding the tissue. Tissues are frozen by setting the mold on top of liquid nitrogen until 70-80% of the block turns white at which point the mold is placed on dry ice. The frozen blocks were stored at −80° C. Blocks are sectioned with a cryostat with care taken to avoid warming to greater than −10° C. Initially, the block is equilibrated in the cryostat for about 5 minutes and 6-10 mm sections are cut sequentially. Sections are allowed to dry for at least 30 minutes at room temperature. Following drying, tissues are stored at 4° C. for short term and −80° C. for long term storage.

[0460] Sections are fixed by immersing in acetone jar for 1-2 minutes at room temperature, followed by drying at room temperature. Primary antibody is added (diluted in 0.05 M Tris-saline [0.05 M Tris, 0.15 M NaCl, pH 7.4], 2.5% serum) directly to the sections by covering the section dropwise to cover the tissue entirely. Binding is carried out by incubation a chamber for 1 hour at room temperature. Without letting the sections dry out, the secondary antibody (diluted in Tris-saline/2.5% serum) is added in a similar manner to the primary and incubated as before (at least 45 minutes). Following incubation, the sections are washed gently in Tris-saline for 3-5 minutes and then in Tris-saline/2.5% serum for another 3-5 minutes. If a biotinylated primary antibody is used, in place of the secondary antibody incubation, slides are covered with 100 ul of diluted alkaline phosphatase conjugated streptavidin, incubated for 30 minutes at room temperature and washed as above. Sections are incubated with alkaline phosphatse substrate (1 mg/ml Fast Violet; 0.2 mg/ml Napthol AS-MX phosphate in Tris-Saline pH 8.5) for 10-20 minutes until the desired positive staining is achieved at which point the reaction is stopped by washing twice with Tris-saline. Slides are counter-stained with Mayer's hematoxylin for 30 seconds and washed with tap water for 2-5 minutes. Sections are mounted with Mount coverslips and mounting media.

### 10. Assay for Antibody Dependent Cellular Cytotoxicity

[0461] Cultured tumor cells are labeled with 100 μCi ⁵¹Cr for 1 hour; Livingston, P. O., Zhang, S., Adluri, S., Yao, T.-J., Graeber, L., Ragupathi, G., Helling, F., & Fleischer, M. (1997). Cancer Immunol. Immunother. 43, 324-330. After washing three times with culture medium, cells are resuspended at 10⁵/ml, and 100 μl/well are plated onto 96-well round-bottom plates. A range of antibody concentrations are applied to the wells, including an isotype control together with donor peripheral blood mononuclear cells that are plated at a 100:1 and 50:1 ratio. After an 18-h incubation at 37° C., supernatant (30 μl/well) is harvested and transferred onto Lumaplate 96 (Packard), dried, and read in a Packard Top-Count NXT γ counter. Each measurement is carried out in triplicate. Spontaneous release is determined by cpm of tumor cells incubated with medium and maximum release by cpm of tumor cells plus 1% Triton X-100 (Sigma). Specific lysis is defined as: % specific lysis=[(experimental release−spontaneous release)/(maximum release−spontaneous release)]×100. The percent ADCC is expressed as peak specific lysis postimmune subtracted by preimmune percent specific lysis. A doubling of the ADCC to >20% is considered significant.

### 11. Assay for Complement Dependent Cytotoxicity

[0462] Chromium release assays to assess complement-mediated cytotoxicity are performed for each patient at various time points; Dickler, M. N., Ragupathi, G., Liu, N. X., Musselli, C., Martino, D. J., Miller, V. A., Kris, M. G., Brezicka, F. T., Livingston, P. 0. & Grant, S. C. (1999) Clin. Cancer Res. 5, 2773-2779. Cultured tumor cells are washed in FCS-free media two times, resuspended in 500 μl of media, and incubated with 100 μCi ⁵¹Cr per 10 million cells for 2 h at 37° C. The cells are then shaken every 15 min for 2 h, washed 3 times in media to achieve a concentration of approximately 20,000 cells/well, and then plated in round-bottom plates. The plates contain either 50 μl cells plus 50 μl monoclonal antibody, 50 μl cells plus serum (pre- and posttherapy), or 50 μl cells plus mouse serum as a control. The plates are incubated in a cold room on a shaker for 45 min. Human complement of a 1:5 dilution (resuspended in 1 ml of ice-cold water and diluted with 3% human serum albumin) is added to each well at a volume of 100 μl. Control wells include those for maximum release of isotope in 10% Triton X-100 (Sigma) and for spontaneous release in the absence of complement with medium alone. The plates are incubated for 2 h at 37° C., centrifuged for 3 min, and then 100 μl of supernatant is removed for radioactivity counting. The percentage of specific lysis is calculated as follows: % cytotoxicity=[(experimental release−spontaneous release)/(maximum release−spontaneous release)]×100. A doubling of the CDC to >20% is considered significant.

### 12. In Vitro Assays in Cell Lines

[0463] Lipofectamine was purchased from Invitrogen (Carlsbad, Calif.) and GeneSilencer from Gene Therapy Systems (San Diego, Calif.). Synthetic siRNA oligonucleotides were from Dharmacon (Lafayette, Colo.), Qiagen (Valencia, Calif.) or Ambion (Austin, Tex.) RNeasy 96 Kit was purchased from Qiagen (Valencia, Calif.). Apop-one homogeneous caspase-3/7 kit and CellTiter 96 AQueous One Solution Cell Proliferation Assay were both purchased from Promega (Madison, Wis.). Function blocking antibodies were purchased from Chemicon (Temecula, Calif.), Biotrend (Cologne, Germany) or Alexis Corporation (San Diego, Calif.). Cell invasion assay kits from purchased from Chemicon (Temecula, Calif.). RiboGreen RNA Quantitation Kit was purchased from Molecular probes (Eugene, Oreg.).

### RNAi

[0464] RNAi was performed by using Smartpools (Dharmacon), 4—for Silencing siRNA duplexes (Qiagen) or scrambled negative control siRNA (Ambion). Transient transfections were carried out in triplicate by using either Lipofectamine 2000 from Invitrogen (Carlsbad, Calif.) or by using GeneSilencer from Gene Therapy Systems (San Diego, Calif.) in methods described below. 1 to 4 days after transfections, total RNA was isolated by using the RNeasy 96 Kit (Qiagen) according to manufacturer's instructions and expression of mRNA was quantitated by using TaqMan technology. Protein expression levels were examined by flow cytometry and apoptosis and proliferation assays were performed daily using Apop-one homogeneous caspase-3/7 kit and CellTiter 96 AQueous One Solution Cell Proliferation Assay (see protocols below).

[0465] i) RNAi Transfections—Lipofectamine 2000

[0466] Transient transfections were carried out on sub-confluent pancreatic cancer cell lines as previously described. Elbashir, S. M. et al. (2001) Nature 411: 494-498; Caplen, N. J. et al. (2001) Proc Natl Acad Sci USA 98: 9742-9747; Sharp, P. A. (2001) Genes and Development 15: 485-490. Synthetic RNA to gene of interest or scrambled negative control siRNA was transfected using lipofectamine according to manufacturer's instructions. Cells were plated in 96 well plates in antibiotic free medium. The next day, the transfection reagent and siRNA were prepared for transfection as follows: Each 0.1-1 ul of lipofectamine 2000 and 10-150 mM siRNA were resuspended 25 ul serum-free media and incubated at room temperature for 5 minutes. After incubation, the diluted siRNA and the lipofectamine 2000 were combined and incubated for 20 minutes at room temperature. The cells were then washed and the combined siRNA-Lipofectamine 2000 reagent added. After further 4 hours incubation, 50 ul serum containing medium was added to each well. 1 and 4 days after transfection, expression of mRNA was quantitated by RT-PCR using TaqMan technology and protein expression levels were examined by flow cytometry. Apoptosis and proliferation assays were performed daily using Apop-one homogeneous caspase-3/7 kit and CellTiter 96 AQueous One Solution Cell Proliferation Assay (see protocols below).

[0467] ii) RNAi Transfections—GeneSilencer

[0468] Transient transfections were carried out on sub-confluent pancreatic cancer cell lines as previously described. Elbashir, S. M. et al. (2001) Nature 411: 494-498; Caplen, N. J. et al. (2001) Proc Natl Acad Sci USA 98: 9742-9747; Sharp, P. A. (2001) Genes and Development 15: 485-490. Synthetic RNA to gene of interest or scrambled negative control siRNA was transfected using GeneSilencer according to manufacturer's instructions. Cells were plated in 96 well plates in antibiotic free medium. The next day, the transfection reagent and the synthetic siRNA were prepared for transfection as follows: predetermined amount of Gene Silencer was diluted in serum-free media to a final volume of 20 ul per well. After resuspending 10-150 mM siRNA in 20 ul serum-free media, the reagents were combined and incubated at room temperature for 5-20 minutes. After incubation, the siRNA—Gene Silencer reagent was added to each well and incubated in a 37° C. incubator for 4 hours before an equal volume of serum containing media was added back to the cultured cells. The cells were then incubated for 1 to 4 days before mRNA, protein expression and effects on apoptosis and proliferation were examined.

### Testing of Functional Blocking Antibodies

[0469] Sub-confluent pancreatic cancer cell lines are serum-staved overnight.

[0470] The next day, serum-containing media is added back to the cells in the presence of 5-50 ng/ml of function blocking antibodies. After 2 or 5 days incubation at 37° C., 5% CO₂, antibody binding is examined by flow cytometry and apoptosis and proliferation are examined by using protocols described below.

### Apoptosis

[0471] Apoptosis assay is performed by using the Apop-one homogeneous caspase-3/7 kit from Promega. Briefly, the caspase-3/7 substrate is thawed to room temperature and diluted 1:100 with buffer. The diluted substrate is then added 1:1 to cells, control or blank. The plates are then placed on a plate shaker for 30 minutes to 18 hours at 300-500 rpm. The fluorescence of each well is then measured at using an excitation wavelength of 485+/−20 nm and an emission wavelength of 530+/−25 nm.

### Proliferation

[0472] Proliferation assay is performed by using the CellTiter 96 AQueous One Solution Cell Proliferation Assay kit from Promega. 20 ul of CellTiter 96 AQueous One Solution is added to 100 ul of culture medium. The plates are then incubated for 1-4 hours at 37° C. in a humidified 5% CO₂ incubator. After incubation, the change in absorbance is read at 490 nm. One example of the proliferation assay is MTS (3-(4,5-dimethylthiazol-2-yl)-5-(3-carboxymethanoxyphenyl)-2-(4-sulfophenyl)-2H-tetrazolium) proliferation assay.

### Cell Invasion

[0473] Cell invasion assay is performed by using the 96 well cell invasion assay kit available from Chemicon. After the cell invasion chamber plates are adjusted to room temperature, 100 ul serum-free media is added to the interior of the inserts. 1-2 hours later, cell suspensions of 1×10⁶ cells/ml are prepared. Media is then carefully removed from the inserts and 100 ul of prepared cells are added into the insert +/−0 to 50 ng function blocking antibodies. The cells are pre-incubated for 15 minutes at 37° C. before 150 ul of media containing 10% FBS is added to the lower chamber. The cells are then incubated for 48 hours at 37° C. After incubation, the cells from the top side of the insert are discarded and the invasion chamber plates are then placed on a new 96-well feeder tray containing 150 ul of pre-warmed cell detachment solution in the wells. The plates are incubated for 30 minutes at 37° C. and are periodically shaken. Lysis buffer/dye solution (4 ul CyQuant Dye/300 ul 4× lysis buffer) is prepared and added to each well of dissociation buffer/cells on feeder tray. The plates are incubated for 15 minutes at room temperature before 150 ul is transferred to a new 96-well plate. Fluorescence of invading cells is then read at 480 nm excitation and 520 nm emission.

### Receptor Internalization

[0474] For quantification of receptor internalization, ELISA assays are performed essentially as described by Daunt et al. Daunt, D. A., Hurtz, C., Hein, L., Kallio, J., Feng, F., and Kobilka, B. K. (1997) Mol. Pharmacol. 51, 711-720. The cell lines are plated at 6×10⁵ cells per in a 24-well tissue culture dishes that have previously been coated with 0.1 mg/ml poly-L-lysine. The next day, the cells are washed once with PBS and incubated in DMEM at 37° C. for several minutes. Agonist to the cell surface target of interest is then added at a pre-determined concentration in prewarmed DMEM to the wells. The cells are then incubated for various times at 37° C. and reactions are stopped by removing the media and fixing the cells in 3.7% formaldehyde/TBS for 5 min at room temperature. The cells are then washed three times with TBS and nonspecific binding blocked with TBS containing 1% BSA for 45 min at room temperature. The first antibody is added at a pre-determined dilution in TBS/BSA for 1 hr at room temperature. Three washes with TBS followed, and cells are briefly reblocked for 15 min at room temperature. Incubation with goat anti-mouse conjugated alkaline phosphatase (Bio-Rad) diluted 1:1000 in TBS/BSA is carried out for 1 h at room temperature. The cells are washed three times with TBS and a colorimetric alkaline phosphatase substrate is added. When the adequate color change is reached, 100-0 samples are taken for colorimetric readings.

mRNA Expression

[0475] Expression of mRNA is quantitated by RT-PCR using TaqMan® technology. Total RNA is isolated from cancer model cell lines using the RNEasy 96 kit (Qiagen) per manufacturer's instructions and included DNase treatment. Target transcript sequences are identified for the differentially expressed peptides by searching the BlastP database. TaqMan assays (PCR primer/probe set) specific for those transcripts are identified by searching the Celera Discovery System™ (CDS) database. The assays are designed to span exon-exon borders and do not amplify genomic DNA. The TaqMan primers and probe sequences are as designed by Applied Biosystems (AB) as part of the Assays on Demand™ product line or by custom design through the AB Assays by Design^{SM} service. RT-PCR is accomplished using AmpliTaqGold and MultiScribe reverse transcriptase in the One Step RT-PCR Master Mix reagent kit (AB) according to the manufacturers instructions. Probe and primer concentrations are 900 nM and 250 nM, respectively, in a 250 reaction. For each experiment, a master mix of the above components is made and aliquoted into each optical reaction well. 5 ul of total RNA is the template. Each sample is assayed in triplicate. Quantitative RT-PCR is performed using the ABI Prism® 7900HT Sequence Detection System (SDS). Cycling parameters follow: 48° for 30 min. for one cycle; 95° C. for 10 min for one cycle; 95° C. for 15 sec, 60° C. for 1 min. for 40 cycles.

[0476] The SDS software calculates the threshold cycle (C_{T}) for each reaction, and C_{T} values are used to quantitate the relative amount of starting template in the reaction. The C_{T} values for each set of three reactions are averaged for all subsequent calculations.

[0477] Total RNA is quantitated by using RiboGreen RNA Quantitation Kit according to manufacturer's instructions and the % mRNA expression is calculated using total RNA for normalization. % knockdown is then calculated relative to the no addition control.

### Results

[0478] The assay was performed on analysis of Mucin 4 knowdown. Mucin 4 siRNA induced apoptosis of ASPC-1 cells 3 days after transfection, and level of apoptosis was dose-dependent on muscin siRNA (n=3). The level of apoptosis on day 3 was similar to that given by TRAIL+actinomycin D positive control (FIG. 5). Moreover, FIG. 6 also shows that Mucin 4 siRNA inhibited the proliferation of ASPC-1 cells (n=3). FIG. 7 shows that the level of inhibition was dose-dependent on the concentration of Mucin 4 siRNA (n=3). The result shows that Mucin 4 siRNA can inhibit about 50% of viable ASPC-1 cells 3 days after transfection (n=2). Both SMARTPool Mucin 4 siRNA and Mucin 4 duplex1 siRNA can induce an inhibition of proliferation and an increase in apoptosis 3 days after transfection (FIG. 8). Additional assays were also performed on other targets: Apoptosis occurred when Na+/K+ transporting ATPase beta-3 chain (PA-088), GS3786(PA-078), CD49c(PA-009), siRNA were administrated in Cacaspase 3/7 analysis in ASPC-1 cell line. Apoptosis occurred when Na+/K+ transporting ATPase beta-3 chain, GS3786, and Celera protein RNAi were administrated in Cacaspase 3/7 analysis in BXPC-3 cell line. Specifically, Na+/K+ transporting ATPase beta-3 chain increased apoptosis of ASPC-1 pancreatic cancer cells in a dose-dependent manner and can decrease proliferation of ASPC-1 pancreatic cancer cells. GS3786 siRNA increased apoptosis of ASPC-1 pancreatic cancer cells in a dose-dependent manner. It increased apoptosis of BXPC-3 pancreatic cancer cells and decreased proliferation of ASPC-1 and BXPC-3 pancreatic cancer cells. CD49c siRNA increased apoptosis of BXPC-3 pancreatic cancer cells in a dose-dependent manner and decreased proliferation of BXPC-3 pancreatic cancer cells in a dose-dependent manner. (FIG. 11 and FIG. 12]

### 13. In Vivo Studies by Using Antibodies

[0479] Treatment of Pancreatic Cancer Cells with Monoclonal Antibodies.

[0480] Pancreatic cancer cells are seeded at a density of 4×10⁴ cells per well in 96-well microtiter plates and allowed to adhere for 2 hours. The cells are then treated with different concentrations of anti-PCAT monoclonal antibody (Mab) or irrelevant isotype matched (anti-rHuIFN-.gamma. Mab) at 0.05, 0.5 or 5.0 mug/ml. After a 72 hour incubation, the cell monolayers are stained with crystal violet dye for determination of relative percent viability (RPV) compared to control (untreated) cells. Each treatment group consists of replicates. Cell growth inhibition is monitored.

Treatment of NIH 3T3 Cells Overexpression PCAT Protein with Monoclonal Antibodies.

[0481] NIH 3T3 expressing PCAT protein are treated with different concentrations of anti-PCAT MAbs. Cell growth inhibition is monitored.

In Vivo Treatment of NIH 3T3 Cells Overexpressing PCAT with Anti-PCAT Monoclonal Antibodies.

[0482] NIH 3T3 cells transfected with either a PCAT expression plasmid or the neo-DHFR vector are injected into nu/nu (athymic) mice subcutaneously at a dose of 10⁶ cells in 0.1 ml of phosphate-buffered saline. On days 0, 1, 5 and every 4 days thereafter, 100 mug (0.1 ml in PBS) of either an irrelevant or anti-PCAT monoclonal antibody of the IG2A subclass is injected intraperitoneally. Tumor occurrence and size are monitored for 1 month period of treatment.

[0483] All publications and patents mentioned in the above specification are herein incorporated by reference. Various modifications and variations of the described method and system of the invention will be apparent to those skilled in the art without departing from the scope and spirit of the invention. Although the invention has been described in connection with specific preferred embodiments, it should be understood that the invention as claimed should not be unduly limited to such specific embodiments. Indeed, various modifications of the above-described modes for carrying out the invention, which are obvious to those skilled in the field of molecular biology or related fields, are intended to be within the scope of the following claims.

1. An isolated protein comprising an amino acid sequence selected from the group consisting of SEQ ID NOS:1-288 and 703-873.

2. A composition comprising the protein of claim 1 and a pharmaceutically acceptable carrier.

3. An isolated nucleic acid molecule comprising a nucleotide sequence selected from the group consisting of:
a) SEQ ID NOS:289-702;
b) nucleotide sequences that encode a protein comprising an amino acid sequence selected from the group consisting of SEQ ID NOS:1-288 and 703-873; and
c) nucleotide sequences that are completely complementary to the nucleotide sequences of a) or b).

4. An isolated RNAi or antisense nucleic acid molecule that selectively binds to the nucleic acid molecule of claim 3.

5. An isolated antibody that selectively binds to the protein of claim 1.

6. The antibody of claim 5, wherein the antibody is at least one of a monoclonal, polyclonal, fully human, humanized, chimeric, single-chain, or anti-idiotypic antibody.

7. A cell line, hybridoma, phage, or transgenic organism that produces the antibody of claim 5.

8. The antibody of claim 5, wherein the antibody is coupled to a composition selected from the group consisting of detectable substances and therapeutic agents.

9. A composition comprising the antibody of claim 5 and a pharmaceutically acceptable carrier.

10. An isolated antibody fragment of the antibody of claim 5, wherein the antibody fragment comprises a fragment selected from the group consisting of:
a) an Fab fragment;
b) an F(ab′)₂ fragment; and
c) an Fv fragment.

11. A method of modulating cell proliferation or apoptosis, the method comprising contacting a cell with the antibody of claim 5.

12. The method of claim 11, wherein the method comprises either inhibiting proliferation of pancreatic cancer cells or stimulating apoptosis of pancreatic cancer cells.

13. A method of modulating cell proliferation or apoptosis, the method comprising contacting a cell with the RNAi or antisense nucleic acid molecule of claim 4.

14. A method of detecting the protein of claim 1 in a sample, the method comprising contacting the sample with an isolated antibody that selectively binds to the protein and determining whether the antibody binds to the protein.

15. A method of detecting the nucleic acid molecule of claim 3 in a sample, the method comprising contacting the sample with an oligonucleotide that specifically hybridizes to the nucleic acid molecule and determining whether the oligonucleotide binds to the nucleic acid molecule.

16. A method of diagnosing, prognosing, or determining risk of pancreatic cancer in a subject, the method comprising detecting at least one molecule in a sample, wherein the presence or abundance of the molecule is indicative of pancreatic cancer, and wherein the molecule is selected from the group consisting of:
a) proteins comprising an amino acid sequence selected from the group consisting of SEQ ID NOS:1-288 and 703-873;
b) antibodies that selectively bind to the protein of a);
c) nucleic acid molecules comprising a nucleotide sequence selected from the group consisting of SEQ ID NOS:289-702 and nucleotide sequences that encode the protein of a); and
d) nucleic acid molecules comprising a nucleotide sequence that is completely complementary to the nucleic acid molecule of c).

17. A method of treating pancreatic cancer, the method comprising administering a therapeutically effective amount of the antibody of claim 5 to a subject.

18. A method of screening agents, the method comprising contacting the protein of claim 1 or a cell that expresses the protein with an agent, and assaying for whether the agent binds to the protein or modulates the function, activity, or expression of the protein.

19. A composition comprising the agent identified by the method of claim 18 and a pharmaceutically acceptable carrier.

20. A method of determining or predicting the effectiveness of a treatment or selecting a treatment for administration to a subject having pancreatic cancer, the method comprising detecting the presence, abundance, or activity of the protein of claim 1 in a sample and determining or predicting the effectiveness of the treatment or selecting the treatment for administration based on the presence, abundance, or activity of the protein.

The application's sequence listing, which the Patent Office published only in electronic form, follows.

SEQUENCE LISTING (873 sequences)

SEQ ID NO: 1 - protein, 295 aa, Homo sapiens
METPAWPRVPRPETAVARTLLLGWVFAQVAGASGTTNTVAAYNLTWKSTNFKTILEWEPKPVNQVYTVQISTKSGDWKSKCFYTTDTECDLTDEIVKDVKQTYLARVFSYPAGNVESTGSAGEPLYENSPEFTPYLETNLGQPTIQSFEQVGTKVNVTVEDERTLVRRNNTFLSLRDVFGKDLIYTLYYWKSSSSGKKTAKTNTNEFLIDVDKGENYCFSVQAVIPSRTVNRKSTDSPVECMGQEKGEFREIFYIIGAVVFVVIILVIILAISLHKCRKAGVGQSWKENSPLNVS

SEQ ID NO: 2 - protein, 314 aa, Homo sapiens
MAPPQVLAFGLLLAAATATFAAAQEECVCENYKLAVNCFVNNNRQCQCTSVGAQNTVICSKLAAKCLVMKAEMNGSKLGRRAKPEGALQNNDGLYDPDCDESGLFKAKQCNGTSMCWCVNTAGVRRTDKDTEITCSERVRTYWIIIELKHKAREKPYDSKSLRTALQKEITTRYQLDPKFITSILYENNVITIDLVQNSSQKTQNDVDIADVAYYFEKDVKGESLFHSKKMDLTVNGEQLDLDPGQTLIYYVDEKAPEFSMQGLKAGVIAVIVVVVIAVVAGIVVLVISRKKRMAKYEKAEIKEMGEMHRELNA

SEQ ID NO: 3 - protein, 390 aa, Homo sapiens
MAPPQVLAFGLLLAAATATFAAAQEGEARIGAELWSWAGLGGSGPRPSAPETGIIGRGPRGRAFQRGDRTVRPCSGSGPPRGRKRRGPSRGAASLRSFARLECVCENYKLAVNCFVNNNRQCQCTSVGAQNTVICSKLAAKCLVMKAEMNGSKLGRRAKPEGALQNNDGLYDPDCDESGLFKAKQCNGTSMCWCVNTAGVRRTDKDTEITCSERVRTYWIIIELKHKAREKPYDSKSLRTALQKEITTRYQLDPKFITSILYENNVITIDLVQNSSQKTQNDVDIADVAYYFEKDVKGESLFHSKKMDLTVNGEQLDLDPGQTLIYYVDEKAPEFSMQGLKAGVIAVIVVVVIAVVAGIVVLVISRKKRMAKYEKAEIKEMGEMHRELNA

SEQ ID NO: 4 - protein, 314 aa, Homo sapiens [sequence omitted]

SEQ ID NO: 5 - protein, 516 aa, Homo sapiens
MEPAVSLAVCALLFLLWVRLKGLEFVLIHQRWVFVCLFLLPLSLIFDIYYYVRAWVVFKLSSAPRLHEQRVRDIQKQVREWKEQGSKTFMCTGRPGWLTVSLRVGKYKKTHKNIMINLMDILEVDTKKQIVRVEPLVTMGQVTALLTSIGWTLPVLPELDDLTVGGLIMGTGIESSSHKYGLFQHICTAYELVLADGSFVRCTPSENSDLFYAVPWSCGTLGFLVAAEIRIIPAKKYVKLRFEPVRGLEAICAKFTHESQRQENHFVEGLLYSLDEAVIMTGVMTDEAEPSKLNSIGNYYKPWFFKHVENYLKTNREGLEYIPLRHYYHRHTRSIFWELQDIIPFGNNPIFRYLFGWMVPPKISLLKLTQGETLRKLYEQHHVVQDMLVPMKCLQQALHTFQNDIHVYPIWLCPFILPSQPGLVHPKGNEAELYIDIGAYGEPRVKHFEARSCMRQLEKFVRSVHGFQMLYADCYMNREEFWEMFDGSLYHKLREKLGCQDAFPEVYDKICKAARH

SEQ ID NO: 6 - protein, 219 aa, Homo sapiens
MNYNIIFKIIKHFKNYTSTCEASNGQICNGRGICECGVCKCTDPKFQGQTCEMCQTCLGVCAEHKECVQCRAFNKGEKKDTCTQECSYFNITKVESRDKLPQPVQPDPVSHCKEKDVDDCWFYFTYSVNGNNEVMVHVVENPECPTGPDIIPIVAGVVAGIVLIGLALLLIWKLLMIIHDRREFAKFEKEKMNAKWDTGENPIYKSAVTTVVNPKYEGK

SEQ ID NO: 7 - protein, 819 aa, Homo sapiens
MNLQPIFWIGLISSVCCVFAQTDENRCLKANAKSCGECIQAGPNCGWCTNSTFLQEGMPTSARCDDLEALKKKGCPPDDIENPRGSKDIKKNKNVTNRSKGTAEKLKPEDITQIQPQQLVLRLRSGEPQTFTLKFKRAEDYPIDLYYLMDLSYSMKDDLENVKSLGTDLMNEMRRITSDFRIGFGSFVEKTVMPYISTTPAKLRNPCTSEQNCTSPFSYKNVLSLTNKGEVFNELVGKQRISGNLDSPEGGFDAIMQVAVCGSLIGWRNVTRLLVFSTDAGFHFAGDGKLGGIVLPNDGQCHLENNMYTMSHYYDYPSIAHLVQKLSENNIQTIFAVTEEFQPVYKELKNLIPKSAVGTLSANSSNVIQLIIDAYNSLSSEVILENGKLSEGVTISYKSYCKNGVNGTGENGRKCSNISIGDEVQFEISITSNKCPKKDSDSFKIRPLGFTEEVEVILQYICECECQSEGIPESPKCHEGNGTFECGACRCNEGRVGRHCECSTDEVNSEDMDAYCRKENSSEICSNNGECVCGQCVCRKRDNTNEIYSGKFCECDNFNCDRSNGLICGGNGVCKCRVCECNPNYTGSACDCSLDTSTCEASNGQICNGRGICECGVCKCTDPKFQGQTCEMCQTCLGVCAEHKECVQCRAFNKGEKKDTCTQECSYFNITKVESRDKLPQPVQPDPVSHCKEKDVDDCWFYFTYSVNGNNEVMVHVVENPECPTGPDIIPIVAGVVAGIVLIGLALLLIWKLLMIIHDRREFAKFEKEKMNAKWDTPGVQWCDISSLQPLTSRFQQFSCLSLPSTWDYRVKILFIRVP

SEQ ID NO: 8 - protein, 825 aa, Homo sapiens
MNLQPIFWIGLISSVCCVFAQTDENRCLKANAKSCGECIQAGPNCGWCTNSTFLQEGMPTSARCDDLEALKKKGCPPDDIENPRGSKDIKKNKNVTNRSKGTAEKLKPEDITQIQPQQLVLRLRSGEPQTFTLKFKRAEDYPIDLYYLMDLSYSMKDDLENVKSLGTDLMNEMRRITSDFRIGFGSFVEKTVMPYISTTPAKLRNPCTSEQNCTSPFSYKNVLSLTNKGEVFNELVGKQRISGNLDSPEGGFDAIMQVAVCGSLIGWRNVTRLLVFSTDAGFHFAGDGKLGGIVLPNDGQCHLENNMYTMSHYYDYPSIAHLVQKLSENNIQTIFAVTEEFQPVYKELKNLIPKSAVGTLSANSSNVIQLIIDAYNSLSSEVILENGKLSEGVTISYKSYCKNGVNGTGENGRKCSNISIGDEVQFEISITSNKCPKKDSDSFKIRPLGFTEEVEVILQYICECECQSEGIPESPKCHEGNGTFECGACRCNEGRVGRHCECSTDEVNSEDMDAYCRKENSSEICSNNGECVCGQCVCRKRDNTNEIYSGKFCECDNFNCDRSNGLICGGNGVCKCRVCECNPNYTGSACDCSLDTSTCEASNGQICNGRGICECGVCKCTDPKFQGQTCEMCQTCLGVCAEHKECVQCRAFNKGEKKDTCTQECSYFNITKVESRDKLPQPVQPDPVSHCKEKDVDDCWFYFTYSVNGNNEVMVHVVENPECPTGPDIIPIVAGVVAGIVLIGLALLLIWKLLMIIHDRREFAKFEKEKMNAKWDTSLSVAQPGVQWCDISSLQPLTSRFQQFSCLSLPSTWDYRVKILFIRVP

SEQ ID NO: 9 - protein, 798 aa, Homo sapiens
MNLQPIFWIGLISSVCCVFAQTDENRCLKANAKSCGECIQAGPNCGWCTNSTFLQEGMPTSARCDDLEALKKKGCPPDDIENPRGSKDIKKNKNVTNRSKGTAEKLKPEDITQIQPQQLVLRLRSGEPQTFTLKFKRAEDYPIDLYYLMDLSYSMKDDLENVKSLGTDLMNEMRRITSDFRIGFGSFVEKTVMPYISTTPAKLRNPCTSEQNCTSPFSYKNVLSLTNKGEVFNELVGKQRISGNLDSPEGGFDAIMQVAVCGSLIGWRNVTRLLVFSTDAGFHFAGDGKLGGIVLPNDGQCHLENNMYTMSHYYDYPSIAHLVQKLSENNIQTIFAVTEEFQPVYKELKNLIPKSAVGTLSANSSNVIQLIIDAYNSLSSEVILENGKLSEGVTISYKSYCKNGVNGTGENGRKCSNISIGDEVQFEISITSNKCPKKDSDSFKIRPLGFTEEVEVILQYICECECQSEGIPESPKCHEGNGTFECGACRCNEGRVGRHCECSTDEVNSEDMDAYCRKENSSEICSNNGECVCGQCVCRKRDNTNEIYSGKFCECDNFNCDRSNGLICGGNGVCKCRVCECNPNYTGSACDCSLDTSTCEASNGQICNGRGICECGVCKCTDPKFQGQTCEMCQTCLGVCAEHKECVQCRAFNKGEKKDTCTQECSYFNITKVESRDKLPQPVQPDPVSHCKEKDVDDCWFYFTYSVNGNNEVMVHVVENPECPTGPDIIPIVAGVVAGIVLIGLALLLIWKLLMIIHDRREFAKFEKEKMNAKWDTGENPIYKSAVTTVVNPKYEGK

SEQ ID NO: 10 - protein, 801 aa, Homo sapiens
MNLQPIFWIGLISSVCCVFAQTDENRCLKANAKSCGECIQAGPNCGWCTNSTFLQEGMPTSARCDDLEALKKKGCPPDDIENPRGSKDIKKNKNVTNRSKGTAEKLKPEDITQIQPQQLVLRLRSGEPQTFTLKFKRAEDYPIDLYYLMDLSYSMKDDLENVKSLGTDLMNEMRRITSDFRIGFGSFVEKTVMPYISTTPAKLRNPCTSEQNCTSPFSYKNVLSLTNKGEVFNELVGKQRISGNLDSPEGGFDAIMQVAVCGSLIGWRNVTRLLVFSTDAGFHFAGDGKLGGIVLPNDGQCHLENNMYTMSHYYDYPSIAHLVQKLSENNIQTIFAVTEEFQPVYKELKNLIPKSAVGTLSANSSNVIQLIIDAYNSLSSEVILENGKLSEGVTISYKSYCKNGVNGTGENGRKCSNISIGDEVQFEISITSNKCPKKDSDSFKIRPLGFTEEVEVILQYICECECQSEGIPESPKCHEGNGTFECGACRCNEGRVGRHCECSTDEVNSEDMDAYCRKENSSEICSNNGECVCGQCVCRKRDNTNEIYSGKFCECDNFNCDRSNGLICGGNGVCKCRVCECNPNYTGSACDCSLDTSTCEASNGQICNGRGICECGVCKCTDPKFQGQTCEMCQTCLGVCAEHKECVQCRAFNKGEKKDTCTQECSYFNITKVESRDKLPQPVQPDPVSHCKEKDVDDCWFYFTYSVNGNNEVMVHVVENPECPTGPDIIPIVAGVVAGIVLIGLALLLIWKLLMIIHDRREFAKFEKEKMNAKWDTQENPIYKSPINNFKNPNYGRKAGL

SEQ ID NO: 11 - protein, 789 aa, Homo sapiens
MNLQPIFWIGLISSVCCVFAQTDENRCLKANAKSCGECIQAGPNCGWCTNSTFLQEGMPTSARCDDLEALKKKGCPPDDIENPRGSKDIKKNKNVTNRSKGTAEKLKPEDITQIQPQQLVLRLRSGEPQTFTLKFKRAEDYPIDLYYLMDLSYSMKDDLENVKSLGTDLMNEMRRITSDFRIGFGSFVEKTVMPYISTTPAKLRNPCTSEQNCTSPFSYKNVLSLTNKGEVFNELVGKQRISGNLDSPEGGFDAIMQVAVCGSLIGWRNVTRLLVFSTDAGFHFAGDGKLGGIVLPNDGQCHLENNMYTMSHYYDYPSIAHLVQKLSENNIQTIFAVTEEFQPVYKELKNLIPKSAVGTLSANSSNVIQLIIDAYNSLSSEVILENGKLSEGVTISYKSYCKNGVNGTGENGRKCSNISIGDEVQFEISITSNKCPKKDSDSFKIRPLGFTEEVEVILQYICECECQSEGIPESPKCHEGNGTFECGACRCNEGRVGRHCECSTDEVNSEDMDAYCRKENSSEICSNNGECVCGQCVCRKRDNTNEIYSGKFCECDNFNCDRSNGLICGGNGVCKCRVCECNPNYTGSACDCSLDTSTCEASNGQICNGRGICECGVCKCTDPKFQGQTCEMCQTCLGVCAEHKECVQCRAFNKGEKKDTCTQECSYFNITKVESRDKLPQPVQPDPVSHCKEKDVDDCWFYFTYSVNGNNEVMVHVVENPECPTGPDIIPIVAGVVAGIVLIGLALLLIWKLLMIIHDRREFAKFEKEKMNAKWDTVSYKTSKKQSGL

SEQ ID NO: 12 - protein, 682 aa, Homo sapiens
MPTSARCDDLEALKKKGCPPDDIENPRGSKDIKKNKNVTNRSKGTAEKLKPEDITQIQPQQLVLRLRSGEPQTFTLKFKRAEDYPIDLYYLMDLSYSMKDDLENVKSLGTDLMNEMRRITSDFRIGFGSFVEKTVMPYISTTPAKLRNPCTSEQNCTSPFSYKNVLSLTNKGEVFNELVGKQRISGNLDSPEGGFDAIMQVAVCGSLIGWRNVTRLLVFSTDAGFHFAGDGKLGGIVLPNDGQCHLENNMYTMSHYYDYPSIAHLVQKLSENNIQTIFAVTEEFQPVYKELKNLIPKSAVGTLSANSSNVIQLIIDAYNSLSSEVILENGKLSEGVTISYKSYCKNGVNGTGENGRKCSNISIGDEVQFEISITSNKCPKKDSDSFKIRPLGFTEEVEVILQYICECECQSEGIPESPKCHEGNGTFECGACRCNEGRVGRHCECSTDEVNSEDMDAYCRKENSSEICSNNGECVCGQCVCRKRDNTNEIYSGKFCECDNFNCDRSNGLICGGNGVCKCRVCECNPNYTGSACDCSLDTSTCEASNGQICNGRGICECGVCKCTDPKFQGQTCEMCQTCLGVCAEHKECVQCRAFNKVESRDKLPQPVQPDPVSHCKEKDVDDCWFYFTYSVNGNNEVMVHVVENPVSHWSRHHSNCSWCGCWNCSYWPCITADMEAFNDNS

SEQ ID NO: 13 - protein, 798 aa, Homo sapiens [sequence omitted]

SEQ ID NO: 14 - protein, 198 aa, Homo sapiens
MVFPKPVTALEYTFSRSDPTSYAGYIEDLKKFLKPYTLEEQKNLTVCPDGALFEQKGPVYVACQFPISLLQACSGMNDPDFGYSQGNPCILVKMNRIIGLKPEGVPRIDCVSKNEDIPNVAVYPHNGMIDLKYFPYYGKKLHVGYLQPLVAVQVSFAPNNTGKEVTVECKIDGSANLKSQDDRDKFLGRVMFKITARA

SEQ ID NO: 15 - protein, 265 aa, Homo sapiens
MLSEGDILFSSLLSSPSLFWPPGLILLFYLVFYGFLAALFSFTMWVMLQTLNDEVPKYRDQIPSPGLMVFPKPVTALEYTFSRSDPTSYAGYIEDLKKFLKPYTLEEQKNLTVCPDGALFEQKGPVYVACQFPISLLQACSGMNDPDFGYSQGNPCILVKMNRIIGLKPEGVPRIDCVSKNEDIPNVAVYPHNGMIDLKYFPYYGKKLHVGYLQPLVAVQVSFAPNNTGKEVTVECKIDGSANLKSQDDRDKFLGRVMFKITARA

SEQ ID NO: 16 - protein, 231 aa, Homo sapiens
MLSEGDILFSSLLSSPSLFWPPGLILLFYLVFYGFLAALFSFTMWVMLQTLNDEVPKYRDQIPSPGLMVFPKPVTALEYTFSRSDPTSYAGYIEDLKKFLKPYTLEEQKNLTVCPDGALFEQKGPVYVACQFPISLLQACSGMNDPDFGYSQGNPCILVKMNRIIGLKPEGVPRIDCVSKNEDIPNVAVYPHNGMIDLKYFPYYGKKLHVGYLQPLVAVQVSFAPNNTGKE

SEQ ID NO: 17 - protein, 222 aa, Homo sapiens
MWVMLQTLNDEVPKYRDQIPSPGLMVFPKPVTALEYTFSRSDPTSYAGYIEDLKKFLKPYTLEEQKNLTVCPDGALFEQKGPVYVACQFPISLLQACSGMNDPDFGYSQGNPCILVKMNRIIGLKPEGVPRIDCVSKNEDIPNVAVYPHNGMIDLKYFPYYGKKLHVGYLQPLVAVQVSFAPNNTGKEVTVECKIDGSANLKSQDDRDKFLGRVMFKITARA

SEQ ID NO: 18 - protein, 279 aa, Homo sapiens
MTKNEKKSLNQSLAEWKLFIYNPTTGEFLGRTAKSWGLILLFYLVFYGFLAALFSFTMWVMLQTLNDEVPKYRDQIPSPGLMVFPKPVTALEYTFSRSDPTSYAGYIEDLKKFLKPYTLEEQKNLTVCPDGALFEQKGPVYVACQFPISLLQACSGMNDPDFGYSQGNPCILVKMNRIIGLKPEGVPRIDCVSKNEDIPNVAVYPHNGMIDLKYFPYYGKKLHVGYLQPLVAVQVSFAPNNTGKEVTVECKIDGSANLKSQDDRDKFLGRVMFKITARA

SEQ ID NO: 19 - protein, 921 aa, Homo sapiens
MQWDVAQRSGKPVLMGFSSGDGYFENSPLMSQPVWERYRPDRFLNSNSGLQGLQFYRLHREERPNYRLECLQWLKSQPRWPSWGWNQVSCPCSWQQGRRDLRFQPVSIGRWGLGSRQLCSFTSWRGGVCCSYGPWGEFREGWHVQRPWQLAQELEPQSWCCRWNDKPYLCALYQQRRPHVGCATYRPPQPAWMFGDPHITTLDGVSYTFNGLGDFLLVGAQDGNSSFLLQGRTAQTGSAQATNFIAFAAQYRSSSLGPVTVQWLLEPHDAIRVLLDNQTVTFQPDHEDGGGQETFNATGVLLSRNGSEVSASFDGWATVSVIALSNILHSSASLPPEYQNRTEGLLGVWNNNPEDDFRMPNGSTIPPGSPEEMLFHFGMTWQINGTGLLGKRNDQLPSNFTPVFYSQLQKNSSWAEHLISNCDGDSSCIYDTLALRNASIGLHTREVSKNYEQANATLNQYPPSINGGRVIEAYKGQTTLIQYTSNAEDANFTLRDSCTDLELFENGTLLWTPKSLEPFTLEILARSAKIGLASALQPRTVVCHCNAESQCLYNQTSRVGNSSLEVAGCKCDGGTFGRYCEGSEDACEEPCFPSVHCVPGKGCEACPPNLTGDGRHCAALGSSFLCQNQSCPVNYCYNQGHCYISQTLGCQPMCTCPPAFTDSRCFLAGNNFSPTVNLELPLRVIQLLLSEEENASMAEVNASVAYRLGTLDMRAFLRNSQVERIDSAAPASGSPIQHWMVISEFQYRPRGPVIDFLNNQLLAAVVEAFLYHVPRRSEEPRNDVVFQPISGEDVRDVTALNVSTLKAYFRCDGYKGYDLVYSPQSGFTCVSPCSRGYCDHGGQCQHLPSGPRCSCVSFSIYTAWGEHCEHLSMKLDAFFGIFFGALGGLLLLGVGTFVVLRFWGCSGARFSYFLNSAEALP

SEQ ID NO: 20 - protein, 563 aa, Homo sapiens
MPNGSTIPPGSPEEMLFHFGMTWQINGTGLLGKRNDQLPSNFTPVFYSQLQKNSSWAEHLISNCDGDSSCIYDTLALRNASIGLHTREVSKNYEQANATLNQYPPSINGGRVIEAYKGQTTLIQYTSNAEDANFTLRDSCTDLELFENGTLLWTPKSLEPFTLEILARSAKIGLASALQPRTVVCHCNAESQCLYNQTSRVGNSSLEVAGCKCDGGTFGRYCEGSEDACEEPCFPSVHCVPGKGCEACPPNLTGDGRHCAALGSSFLCQNQSCPVNYCYNQGHCYISQTLGCQPMCTCPPAFTDSRCFLAGNNFSPTVNLELPLRVIQLLLSEEENASMAEVNASVAYRLGTLDMRAFLRNSQVERIDSAAPASGSPIQHWMVISEFQYRPRGPVIDFLNNQLLAAVVEAFLYHVPRRSEEPRNDVVFQPISGEDVRDVTALNVSTLKAYFRCDGYKGYDLVYSPQSGFTCVSPCSRGYCDHGGQCQHLPSGPRCSCVSFSIYTAWGEHCEHLSMKLDAFFGIFFGALGGLLLLGVGTFVVLRFWGCSGARFSYFLNSAEALP

SEQ ID NO: 21 - protein, 1176 aa, Homo sapiens [sequence omitted]

SEQ ID NO: 22 - protein, 357 aa, Homo sapiens
MATTVPDGCRNGLKSKYYRLCDKAEAWGIVLETVATAGVVTSVAFMLTLPILVCKVQDSNRRKMLPTQFLFLLGVLGIFGLTFAFIIGLDGSTGPTRFFLFGILFSICFSCLLAHAVSLTKLVRGRKPLSLLVILGLAVGFSLVQDVIAIEYIVLTMNRTNVNVFSELSAPRRNEDFVLLLTYVLFLMALTFLMSSFTFCGSFTGWKRHGAHIYLTMLLSIAIWVAWITLLMLPDFDRRWDDTILSSALAANGWVFLLAYVSPEFWLLTKQRNPMDYPVEDAFCKPQLVKKSYGVENRAYSQEEITQGFEETGDTLYAPYSTHFQLQNQPPQKEFSIPRAHAWPSPYKDYEVKKEGS

SEQ ID NO: 23 - protein, 357 aa, Homo sapiens [sequence omitted]

SEQ ID NO: 24 - protein, 365 aa, Homo sapiens
MASTESSLLRSLGLSPGPGSSEVELDCWFDEDFKFILLPVSYAVVFVLGLGLNAPTLWLFIFRLRPWDATATYMFHLALSDTLYVLSLPTLIYYYAAHNHWPFGTEICKFVRFLFYWNLYCSVLFLTCISVHRYLGICHPLRALRWGRPRLAGLLCLAVWLVVAGCLVPNLFFVTTSNKGTTVLCHDTTRPEEFDHYVHFSSAVMGLLFGVPCLVTLVCYGLMARRLYQPLPGSAQSSSRLRSLRTIAVVLTVFAVCFVPFHITRTIYYLARLLEADCRVLNIVNVVYKVTRPLASANSCLDPVLYLLTGDKYRRQLRQLCGGGKPQPRTAASSLALVSLPEDSSCRWAATPQDSSCSTPRADRL

SEQ ID NO: 25 - protein, 499 aa, Homo sapiens
RPQGPAVESERGFPCRASPARSPLAGQVTHYKQYPPNTSKVYSYFECREKKTENSKLRKVKYEETVFYGLQYILNKYLKGKVVTKEKIQEAKDVYKEHFQDDVVNEKGWNYILEKYDGHLPIEIKAVPEGFVIPRGNVLFTVENTDPECYWLTNWIETILVQSWYPITVATNSREQKKILAKYLLETSGNLDGLEYKLHDFGYRGVSSQETAGIGASAHLVNFKGTDTVAGLALNKKYYGTKDPVPGYSVPAAEHSTITAWGKDHEKDAFEHIVTQFSSVPVSVVSNSYDIYNACEKIWGEDLRHLIVSRSTQAPLIIRPDSGNPLDTVLKVLEILGKKFPVTENSKGYKLLPPYLRVIQGDGVDINTLQEIVEGMKQKMWSIENIAFGSGGGLLQKLTRDLLNCSFKCSYVVTNGLGINVFKDPVADPNKRSKKGRLSLHRTPAGNFVTLEEGKGDLEEYGQDLLHTVFKNGKVTKSYSFDEIRKNAQLNIELEAAHH

SEQ ID NO: 26 - protein, 491 aa, Homo sapiens [sequence omitted]

SEQ ID NO: 27 - protein, 299 aa, Homo sapiens
MEHFDASLSTYFKALLGPRDTRVKGWFLLDNYIPTFICSVIYLLIVWLGPKYMRNKQPFSCRGILVVYNLGLTLLSLYMFCELVTGVWEGKYNFFCQGTRTAGESDMKIIRVLWWYYFSKLIEFMDTFFFILRKNNHQITVLHVYHHASMLNIWWFVMNWVPCGHSYFGATLNSFIHVLMYSYYGLSSVPSMRPYLWWKKYITQGQLLQFVLTIIQTSCGVIWPCTFPLGWLYFQIGYMISLIALFTNFYIQTYNKKGASRRKDHLKDHQNGSMAAVNGHTNSFSPLENNVKPRKLRKD

SEQ ID NO: 28 - protein, 262 aa, Homo sapiens
MEHFDASLSTYFKALLGPRDTRVKGWFLLDNYIPTFICSVIYLLIVWLGPKYMRNKQPFSCRGILVVYNLGLTLLSLYMFCELVTGVWEGKYNFFCQGTRTAGESDMKIIRVLWWYYFSKLIEFMDTFFFILRKNNHQITVLHVYHHASMLNIWWFVMNWVPCGHSSVCADNHPDQLRGHLAVHIPSWLVVFPDWIHDFPDCSLHKLLHSDLQQERGLPKERPPEGPPEWVHGCCEWTHQQLFTPGKQCEAKEAAEGLKSKN

SEQ ID NO: 29 - protein, 301 aa, Homo sapiens
FQMEHFDASLSTYFKALLGPRDTRVKGWFLLDNYIPTFICSVIYLLIVWLGPKYMRNKQPFSCRGILVVYNLGLTLLSLYMFCELVTGVWEGKYNFFCQGTRTAGESDMKIIRVLWWYYFSKLIEFMDTFFFILRKNNHQITVLHVYHHASMLNIWWFVMNWVPCGHSYFGATLNSFIHVLMYSYYGLSSVPSMRPYLWWKKYITQGQLLQFVLTIIQTSCGVIWPCTFPLGWLYFQIGYMISLIALFTNFYIQTYNKKGASRRKDHLKDHQNGSMAAVNGHTNSFSPLENNVKPRKLRKD

SEQ ID NO: 30 - protein, 364 aa, Homo sapiens
MPYQYPALTPEQKKELSDIAHRIVAPGKGILAADESTGSIAKRLQSIGTENTEENRRFYRQLLLTADDRVNPCIGGVILFHETLYQKADDGRPFPQVIKSKGGVVGIKVDKGVVPLAGTNGETTTQGLDGLSERCAQYKKDGADFAKWRCVLKIGEHTPSALAIMENANVLARYASICQQNGIVPIVEPEILPDGDHDLKRCQYVTEKVLAAVYKALSDHHIYLEGTLLKPNMVTPGHACTQKFSHEEIAMATVTALRRTVPPAVTGITFLSGGQSEEEASINLNAINKCPLLKPWALTFSYGRALQASALKAWGGKKENLKAAQEEYVKRALANSLACQGKYTPSGQAGAAASESLFVSNHAY

SEQ ID NO: 31 - protein, 368 aa, Homo sapiens
MPYQYPALTPEQKKELSDIAHRIVAPGKGILAADESTGSIAKRLQSIGTENTEENRRFYRQLLLTADDRVNPCIGGVILFHETLYQKADDGRPFPQVIKSKGGVVGIKVDKGVVPLAGTNGETTTQGLDGLSERCAQYKKDGADFAKWRCVLKIGEHTPSALAIMENANVLARYASICQQVGLQNGIVPIVEPEILPDGDHDLKRCQYVTEKVLAAVYKALSDHHIYLEGTLLKPNMVTPGHACTQKFSHEEIAMATVTALRRTVPPAVTGITFLSGGQSEEEASINLNAINKCPLLKPWALTFSYGRALQASALKAWGGKKENLKAAQEEYVKRALANSLACQGKYTPSGQAGAAASESLFVSNHAY

SEQ ID NO: 32 - protein, 252 aa, Homo sapiens
RPRPHGRTLGRAAAGRAQRLRHRCAWWPDSKWDRRTRSLACQGKLMENRALDPGTRDSYGATSHLPNKGALAKVKNNFKDLMSKLTEGQYVLCRWTDGLYYLGKIKRVSSSKQSCLVTFEDNSKYWVLWKDIQHAGVPGEEPKCNICLGKTSGPLNEILICGKCGLGYHQQCHIPIAGSADQPLLTPWFCRRCIFALAVRVSLPSSPVPASPASSSGADQRLPSQSLSSKQKGHTWALETDSASATVLGQDL

SEQ ID NO: 33 - protein, 254 aa, Homo sapiens
RADPGPTGGHSAGQPRAERSRLRHRCAWWPDSKWDRRTRSLACQGKLMENRALDPGTRDSYGATSHLPNKGALAKVKNNFKDLMSKLTEGQYVLCRWTDGLYYLGKIKRVSSSKQSCLVTFEDNSKYWVLWKDIQHAGVPGEEPKCNICLGKTSGPLNEILICGKCGLGYHQQCHIPIAGSADQPLLTPWFCRRCIFALAVRVSLPSSPVPASPASSSGADQRLPSQSLSSKQKGHTWALETDSASATVLGQDL

SEQ ID NO: 34 - protein, 263 aa, Homo sapiens
GTRVGIKVDKGVVPLAGTNGETTTQGLDGLSERCAQYKKDGADFAKWRCVLKIGEHTPSALAIMENANVLARYASICQQNGIVPIVEPEILPDGDHDLKRCQYVTEKVLAAVYKALSDHHIYLEGTLLKPNMVTPGHACTQKFSHEEIAMATVTALRRTVPPAVTGITFLSGGQSEEEASINLNAINKCPLLKPWALTFSYGRALQASALKAWGGKKENLKAAQEEYVKRALANSLACQGKYTPSGQAGAAASESLFVSNHAY

SEQ ID NO: 35 - protein, 227 aa, Homo sapiens
MRVAGAAKLVVAVAVFLLTFYVISQVFEIKMDASLGNLFARSALDTAARSTKPPRYKCGISKACPEKHFAFKMASGAANVVGPKICLEDNVLMSGVKNNVGRGINVALANGKTGEVLDTKYFDMWGGDVAPFIEFLKAIQDGTIVLMGTYDDGATKLNDEARRLIADLGSTSITNLGFRDNWVFCGGKGIKTKSPFEQHIKNNKDTNKYEGWPEVVEMEGCIPQKQD

SEQ ID NO: 36 - protein, 440 aa, Homo sapiens
MSSCRGQKVAGGLRVVSPFPLCQPAGEPSQGKMRSSCVLLTALVALAAYYVYIPLPGSVSDPWKLMLLDATFRGAQQVSNLIHYLGLSHHLLALNFIIVSFGKKSAWSSAQVKVTDTDFDGVEVRVFEGPPKPEEPLKRSVVYIHGGGWALASAKIRYYDELCTAMAEELNAVIVSIEYRLVPKVYFPEQIHDVVRATKYFLKPEVLQKYMVDPGRICISGDSAGGNLAAALGQQFTQDASLKNKLKLQALIYPVLQALDFNTPSYQQNVNTPILPRYVMVKYWVDYFKGNYDFVQAMIVNNHTSLDVEEAAAVRARLNWTSLLPASFTKNYKPVVQTTGNARIVQELPQLLDARSAPLIADQAVLQLLPKTYILTCEHDVLRDDGIMYAKRLESAGVEVTLDHFEDGFHGCMIFTSWPTNFSVGIRTRNSYIKWLDQNL

SEQ ID NO: 37 - protein, 430 aa, Homo sapiens
GGLRVVSPFPLCQPAGEPSRGKMRSSCVLLTALVALATYYVYIPLPGSVSDPWKLMLLDATFRGAQQVSNLIHYLGLSHHLLALNFIIVSFGKKSAWSSAQVKVTDTDFDGVEVRVFEGPPKPEEPLKRSVVYIHGGGWALASAKIRYYDELCTAMAEELNAVIVSIEYRLVPKVYFPEQIHDVVRATKYFLKPEVLQKYMVDPGRICISGDSAGGNLAAALGQQFTQDASLKNKLKLQALIYPVLQALDFNTPSYQQNVNTPILPRYVMVKYWVDYFKGNYDFVQAMIVNNHTSLDVEEAAAVRARLNWTSLLPASFTKNYKPVVQTTGNARIVQELPQLLDARSAPLIADQAVLQLLPKTYILTCEHDVLRDDGIMYAKRLESAGVEVTLDHFEDGFHGCMIFTSWPTNFSVGIRTRNSYIKWLDQNL

SEQ ID NO: 38 - protein, 154 aa, Homo sapiens
MAQVDSGLELSWGSLFAAAAAAATAVLGARSPAMGNTLQSFRDHTFLYEKLYTGKPNLVNGLQARTFGIWTLLSSVIRCLCAIDIHNKTLYHITLWTFLLALGHFLSELFVYGTAAPTIGVLAPLMVASFSILGMLVGLRYLEVEPVSRQKKRN

SEQ ID NO: 39 - protein, 140 aa, Homo sapiens
MSRFLNVLRSWLVMVSIIAMGNTLQSFRDHTFLYEKLYTGKPNLVNGLQARTFGIWTLLSSVIRCLCAIDIHNKTLYHITLWTFLLALGHFLSELFVYGTAAPTIGVLAPLMVASFSILGMLVGLRYLEVEPVSRQKKRN

SEQ ID NO: 40 - protein, 399 aa, Homo sapiens
MAERRRHKKRIQEVGEPSKEEKAVAKYLRFNCPTKSTNMMGHRVDYFIASKAVDCLLDSKWAKAKKGEEALFTTRESVVDYCNRLLKKQFFHRALKVMKMKYDKDIKKEKDKGKAESGKEEDKKSKKENIKDEKTKKEKEKKKDGEKEESKKEETPGTPKKKETKKKFKLEPHDDQVFLDGNEVYVWIYDPVHFKTFVMGLILVIAVIAATLFPLWPAEMRVGVYYLSVGAGCFVASILLLAVARCILFLIIWLITGGRHHFWFLPNLTADVGFIDSFRPLYTHEYKGPKADLKKDEKSETKKQQKSDSEEKSDSEKKEDEEGKVGPGNHGTEGSGGERHSDTDSDRREDDRSQHSSGNGNDFEMITKEELEQQTDGDCEEDEEEENDGETPKSSHEKS

SEQ ID NO: 41 - protein, 183 aa, Homo sapiens
MAERRRHKKRIQEVGEPSKEEKAVAKYLRFNCPTKSTNMMGHRVDYFIASKAVDCLLDSKWAKAKKGEEALFTTRESVVDYCNRLLKKQFFHRALKVMKMKYDKDIKKEKDKGKAESGKEEDKKSKKENIKDEKTKKEKEKKKDGEKEESKKEETPGTPKKKETKKKFKLEPHDDQVFLDGNE

SEQ ID NO: 42 - protein, 361 aa, Homo sapiens
MMGHRVDYFIASKAVDCLLDSKWAKAKKGEEALFTTRESVVDYCNRLLKKQFFHRALKVMKMKYDKDIKKEKDKGKAESGKEEDKKSKKENIKDEKTKKEKEKKKDGEKEESKKEETPGTPKKKETKKKFKLEPHDDQVFLDGNEVYVWIYDPVHFKTFVMGLILVIAVIAATLFPLWPAEMRVGVYYLSVGAGCFVASILLLAVARCILFLIIWLITGGRHHFWFLPNLTADVGFIDSFRPLYTHEYKGPKADLKKDEKSETKKQQKSDSEEKSDSEKKEDEEGKVGPGNHGTEGSGGERHSDTDSDRREDDRSQHSSGNGNDFEMITKEELEQQTDGDCEEDEEEENDGETPKSSHEKS

SEQ ID NO: 43 - protein, 702 aa, Homo sapiens
MESPSAPPHRWCIPWQRLLLTASLLTFWNPPTTAKLTIESTPFNVAEGKEVLLLVHNLPQHLFGYSWYKGERVDGNRQIIGYVIGTQQATPGPAYSGREIIYPNASLLIQNIIQNDTGFYTLHVIKSDLVNEEATGQFRVYPELPKPSISSNNSKPVEDKDAVAFTCEPETQDATYLWWVNNQSLPVSPRLQLSNGNRTLTLFNVTRNDTASYKCETQNPVSARRSDSVILNVLYGPDAPTISPLNTSYRSGENLNLSCHAASNPPAQYSWFVNGTFQQSTQELFIPNITVNNSGSYTCQAHNSDTGLNRTTVTTITVYAEPPKPFITSNNSNPVEDEDAVALTCEPEIQNTTYLWWVNNQSLPVSPRLQLSNDNRTLTLLSVTRNDVGPYECGIQNELSVDHSDPVILNVLYGPDDPTISPSYTYYRPGVNLSLSCHAASNPPAQYSWLIDGNIQQHTQELFISNITEKNSGLYTCQANNSASGHSRTTVKTITVSAELPKPSISSNNSKPVEDKDAVAFTCEPEAQNTTYLWWVNGQSLPVSPRLQLSNGNRTLTLFNVTRNDARAYVCGIQNSVSANRSDPVTLDVLYGPDTPIISPPDSSYLSGANLNLSCHSASNPSPQYSWRINGIPQQHTQVLFIAKITPNNNGTYACFVSNLATGRNNSIVKSITVSASGTSPGLSAGATVGIMIGVLVGVALI

SEQ ID NO: 44 - protein, 319 aa, Homo sapiens
MLFWVLGLLILCGFLWTRKGKLKIEDITDKYIFITGCDSGFGNLAARTFDKKGFHVIAACLTESGSTALKAETSERLRTVLLDVTDPENVKRTAQWVKNQVGEKGLWGLINNAGVPGVLAPTDWLTLEDYREPIEVNLFGLISVTLNMLPLVKKAQGRVINVSSVGGRLAIVGGGYTPSKYAVEGFNDSLRRDMKAFGVHVSCIEPGLFKTNLADPVKVIEKKLAIWEQLSPDIKQQYGEGYIEKSLDKLKGNKSYVNMDLSPVVECMDHALTSLFPKTHYAAGKDAKIFWIPLSHMPAALQDFLLLKQKAELANPKAV

SEQ ID NO: 45 - protein, 163 aa, Homo sapiens
MLFWVLGLLILCGFLWTRKGKLKIEDITDKYIFITGCDSGFGNLAARTFDKKGFHVIAACLTESGSTALKAETSERLRTVLLDVTDPENVKRTAQWVKNQVGEKGLWGLINNAGVPGVLAPTDWLTLEDYREPIEVNLFGLISVTLNMLPTGHESFWCARLMH

SEQ ID NO: 46 - protein, 279 aa, Homo sapiens
MLFWVLGLLILCGFLWTRKGKLKIEDITDKYIFITGCDSGFGNLAARTFDKKGFHVIAACLTESGSTALKAETSERLRTVLLDVTDPENVKRTAQWVKNQVGEKGLWGLINNAGVPGVLAPTDWLTLEDYREPIEVNLFGLISVTLNMLPLVKKAQGRVINVSSVGGRLAIVGGGYTPSKYAVEGFNDSLRRDMKAFGVHVSCIERLDKLKGNKSYVNMDLSPVVECMDHALTSLFPKTHYAAGKDAKIFWIPLSHMPAALQDFLLLKQKAELANPKAV

SEQ ID NO: 47 - protein, 323 aa, Homo sapiens
MLFWVLGLLILCGFLWTRKGKLKIEDITDKYIFITGCDSGFGNLAARTFDKKGFHVIAACLTESGSTALKAETSERLRTVLLDVTDPENVKRTAQWVKNQVGEKGLWGLINNAGVPGVLAPTDWLTLEDYREPIEVNLFGLISVTLNMLPRPQEDQPGQGGTTLPSPCTAGKLPSVGGGYTPSKYAVEGFNDSLRRDMKAFGVHVSCIEPGLFKTNLADPVKVIEKKLAIWEQLSPDIKQQYGEGYIEKSLDKLKGNKSYVNMDLSPVVECMDHALTSLFPKTHYAAGKDAKIFWIPLSHMPAALQDFLLLKQKAELANPKAV

SEQ ID NO: 48 - protein, 536 aa, Homo sapiens
MQNLNKLQTPEEKFDFLFKKYAELLDEHRTEQKKLKLLQKKQVQIQKEKDQLQGEHSRAILARSKLESLCRELQRHNKTLKEEALQRAREEEEKRKEITSHFQSTLTDIQGQIEQQSERNMKLCQENTELAEKLKSIIDQYELREEHLDKIFKHRELQQKLVDAKLEQAQEMMKEAEERHKREKEYLLNQAAEWKLQAKVLKEQETVLQAQLTLYSGRFEEFQSTLTKSNEVFATFKQEMDKTTKKMKKLEKDTATWKARFENCNKALLDMIEEKALRAKEYECFVMKIGRLENLCRALQEERNELHKKIRDAEISEKDDQSQHNSDEEPESNVSVDQEIDAEEVNSVQTAVKNLATAFMIIHHPESTPHQSKETQPEIGSSQESADAALKEPEQPPLIPSRDSESPLPPLTPQAEAEGGSDAEPPSKASNSPAGLGAETQCEGLPVGAQADQASWKPEAEASGQAPQAPTEASLQKMEADVPAPACAAEEHVAAMVPACEPSRQPPRAAAEELPVGASAGPQPRNVADTNLEGVD

SEQ ID NO: 49 - protein, 505 aa, Homo sapiens
QKKLKLLQKKQVQIQKEKDQLQGEHSRAILARSKLESLCRELQRHNKTLKEEALQRAREEEEKRKEITSHFQSTLTDIQGQIEQQSERNMELCQENTELAEKLKSIIDQYELREEHLDKIFKHRELQQKLVDAKLEQAQEMMKEAEERHKREKEYLLNQAAEWKLQAKMLKEQETVLQAQLTLYSGRFEEFQSTLTKSNEVFATFKQEMDKTTKKMKKLEKDTATWKARFENCNKALLDMIEEKALRAKEYECFVMKIGRLENLCRALQEERNELHKKIRDAEISEKDDQSQHNSDEEPESNVSVDQEIDAEEVNSVQTAVKNLATAFMIIHHPESTPHQSKETQPEIGSSQESADAALKEPEQPPLIPSRDSESPLPPLTPQAEAEGGSDAEPPSKASNSPAGLGAETQCEGLPVGAQADQPSWKPEAEASGQAPQAPTEASLQKMEADVPAPACAAEEHVAAMVPACEPSRQPPRAAAEELPVGASAGPQPRNVADTNLEGVD

SEQ ID NO: 50 - protein, 2951 aa, Homo sapiens [sequence omitted]

SEQ ID NO: 51 - protein, 5065 aa, Homo sapiens
MAATLGAGTPPRPQARSIAGVYVEASGQAQSVYAAMEQGLLPAGLGQALLEAQAATGGLVDLARGQLLPVSKALQQGLVGLELKEKLLAAERATTGYPDPYGGEKLALFQAIGKEVVDRALGQSWLEVQLATGGLVDPAQGVLVAPEPACHQGLLDRETWHKLSELEPGTGDLRFLNPNTLERLTYHQLLERCVRAPGSGLALLPLKITFRSMGGAVSAAELLEVGILDEQAVQGLREGRLAAVDVSARAEVRRYLEGTGSVAGVVLLPEGHKKSFFQAATEHLLPMGTALPLLEAQAATHTLVDPITGQRLWVDEAVRAGLVSPELHEQLLVAEQAVTGHHDPFSGSQIPLFQAMKKGLVDRPLALRLLDAQLATGGLVCPARRLRLPLEAALRCGCLDEDTQRQLSQAGSFSDGTHGGLRYEQLLALCVTDPETGLAFLPLSGGPRGGEPQGPPFIKYSTRQALSTATATVSVGKFRGRPVSLWELLFSEAISSEQRAMLAQQYQEGTLSVEKLAAELSATLEQAAATARVTFSGLRDTVTPGELLKAEIIDQDLYERLEHGQATAKDVGSLASAQRYLQGTGCIAGLLLPGSQERLSIYEARCKGLLRPGTALILLEAQAATGFIIDPKANKGHSVEEALRAAVIGPDVFAKLLSAERAVTGYTDPYTGQQISLFQAMQKGLIVREHGIRLLEAQIATGGVIDPVHSHRVPVDVAYRRGYFDQMLNLILLDPSDDTKGFFDPNTHENLTYLQLLERCVRDPETGLYLLPLSSTQSPLVDSATQQAFQNLLLSVKYGRFQGQRVSAWELINSEYFSEGRRRQLLRRYRQREVTLGQVAKLLEAETQRQADIMLPALRSRVTVHQLLEAGIIDQQLLDQVLAGTISPEALLLMDGVRRYLCGLGAVGGVRLLPSGQRLSLYQAMRQKLLGPRVALALLEAQAATGTIMDPHSPESLSVDEAVRRGVVGPELYGRLKRAEGAIAGFRDPFSGKQVSVFQAMKKGLIPWEQAARLLEAQVATGGIIDPTSHHHLPMPVAIQRGYVDQEMETALSSSSETFPTPDGQGRTSYAQLLEECPRDETSGLHLLPLPESAPALPTEEQVQRSLQAVPGAKDGTSLWDLLSSCHFTEEQRRGLLEDVQEGRTTVPQLLASVQRWVQETKLLAQARVMVPGPRGEVPAVWLLDAGIITQETLEALAQGTQSPAQVAEQPAVKACLWGTGCVAGVLLQPSGAKASIAQAVRDGLLPTGLGQRLLEAQVASGFLVDPLNNQRLSVEDAVKVGLVGRELSEQLGQAERAAAGYPDPYSRASLSLWQAMEKGLVPQNEGLPLLQVQLATGGVVDPVHGVHLPQAAACRLGLLDTQTSQVLTAVDKDNKFFFDPSARDQVTYQQLRERCVCDSETGLLLLPLPSDTVLEVDDHTAVALRAMKVPVSTGRFKGCSVSLWDLLLSEYVGADKRRELVALCRSGRAAALRQVVSAVTALVEAAERQPLQATFRGLRKQVSARDLFRAQLISRKTLDELSQGTTTVKEVAEMDSVKRSLEGGNFIAGVLIQGTQERMSIPEALRRHILRPGTALVLLEAQAATGFIIDPAENRKLTVEEAFKAGMFGKETYVKLLSAERAVTGYTDPYTGQQISLFQAMQKDLIVREHGIRLLEAQIATGGIIDPVHSHRVPVDVAYRCGYFDEEMNRILADPSDDTKGFFDPNTHENLTYLQLLERCVEDPETGLYLLQIIKKGENYVYINEATRHVLQSRTAKMRVGRFADQVVSFWDLLSSPYFTEDRKRELIQEYGAQSGGLEKLLEIITTTIEETETQNQGIKVAAIRGEVTAADLFNSRVIDQKTLHTLRVGRTGGQALSTLECVKPYLEGSDCIAGVTVPSTREVMSLHEASRKELIPAAFATWLLEAQAATGFLLDPCTRQKLSVDEAVDVGLVNEELRERLLKAERAATGYRDPATGDTIPLFQAMQKQLIEKAEALRLLEVQVATGGVIDPQHHHRLPLETAYRRGCLHKDIYALISDQKHMRKRFVDPNTQEKVSYRELQERCRPQEDTGWVLFPVNKAARDSEHIDDETRRALEAEQVEITVGRFRGQKPTLWALLNSEYVTEEKKLQLVRMYRTHTRRALQTVAQLILELIEKQETSNKHLWFQGIRRQITASELLSSAIITEEMLQDLETGRSTTQELMEDDRVKRYLEGTSCIAGVLVPAKDQPGRQEKMSIYQAMWKGVLRPGTALVLLEAQAATGFVIDPVRNLRLSVEEPVPAGVVGSEIQEKLLSAERAVTGYTDPYTGQQISLFQAMQKDLIVREHGIRLLEAQIATGGVIDPVHSHRVPVDVAYRRGYFDEEMNRVLADPSDDTKGFFDPNTHENLTYVQLLRRCVPDPDTGLYMLQLAGRGSAVHQLSEELRCALRDARVTPGSGALQGQSVSVWELLFYREVSEDRRQDLLSRYRAGTLTVEELGATLTSLLAQAQAQARAEAEAGSPRPDPREALRAATMEVKVGRLRGRAVPVWDVLASGYVSRAAREELLAEFGSGTLDLPALTRRLTAIIEEAEEAPGARPQLQDARRGPREPGPAGRGDGDSGRSQREGQGEGETQEAAAAAAAARRQEQTLRDATMEVQRGQFQGRPVSVWDVLFSSYLSEARRDELLAQHAAGALGLPDLVAVLTRVIEETEERLSKVSFRGLRRQVSASELHTSGILGPETLRDLAQGTKTLQEVTEMDSVKRYLEGTSCIAGVLVPAKDQPGRQEKMSIYQAMWKGVLRPGTALVLLEAQAATGFVIDPVRNLRLSVEEAVAAGVVGGEIQEKLLSAERAVTGYTDPYTGQQISLFQAMQKDLIVREHGIRLLEAQIATGGVIDPVHSHRVPVDVAYRRGYFDEEMNRVLADPSDDTKGFFDPNTHENLTYVQLLRRCVPDPDTGLYMLQLAGRGSAVHQLSEELRCALRDARVTPGSGALQGQSVSVWELLFYREVSEDRRQDLLSRYRAGTLTVEELGATLTSLLAQAQAQARAEAEAGSPRPDPREALRAATMEVKVGRLRGRAVPVWDVLASGYVSGAAREELLAEFGSGTLDLPALTRRLTAIIEEAEEAPGARPQLQDAWRGPREPGPAGRGDGDSGRSQREGQGEGETQEAAAAAAAARRQEQTLRDATMEVQRGQFQGRPVSVWDVLFSSYLSEARRDELLAQHAAGALGLPDLVAVLTRVIEETEERLSKVSFRGLRRQVSASELHTSGILGPETLRDLAQGTKTLQEVTEMDSVKRYLEGTSCIAGVLVPAKDQPGRQEKMSIYQAMWKGVLRPGTALVLLEAQAATGFVIDPVRNLRLSVEEAVAAGVVGGEIQEKLLSAERAVTGYTDPYTGQQISLFQAMQKDLIVREHGIRLLEAQIATGGVIDPVHSHRVPVDVAYRRGYFDEEMNRVLADPSDDTKGFFDPNTHENLTYVQLLRRCVPDPDTGLYMLQLAGRGSAVHQLSEELRCALRDARVTPGSGALQGQSVSVWELLFYREVSEDRRQDLLSRYRAGTLTVEELGATLTSLLAQAQAQARAEAEAGSPRPDPREALRAATMEVKVGRLRGRAVPVWDVLASGYVSGAAREELLAEFGSGTLDLPALTRRLTAIIEEAEEAPGARPQLQDAWRGPREPGPAGRGDGDSGRSQREGQGEGETQEAAAAAAAARRQEQTLRDATMEVQRGQFQGRPVSVWDVLFSSYLSEARRDELLAQHAAGALGLPDLVAVLTRVIEETEERLSKVSFRGLRRQVSASELHTSGILGPETLRDLAQGTKTLQEVTEMDSVKRYLEGTSCIAGVLVPAKDQPGRQEKMSIYQAMWKGVLRPGTALVLLEAQAATGFVIDPVRNLRLSVEEAVAAGVVGGEIQEKLLSAERAVTGYTDPYTGQQISLFQAMQKDLIVREHGIRLLEAQIATGGVIDPVHSHRVPVDVAYRRGYFDEEMNRVLADPSDDTKGFFDPNTHENLTYVQLLRRCVPDPDTGLYMLQLAGRGSAVHQLSEELRCALRDARVTPGSGALQGQSVSVWELLFYREVSEDRRQDLLSRYRASTLTVEELGATLTSLLAQAQAQARAEAEAGSPRPDPREALRAATMEVKVGRLRGRAVPVWDVLASGYVSRAAREELLAEFGSGTLDLPALTRRLTAIIEEAEEAPGARPQLQDAWRGPREPGPAGRGDGDSGRSQREGQGEGETQEAAAATAAARRQEQTLRDATMEVQRGQFQGRPVSVWDVLFSSYLSEARRDELLAQHAAGALGLPDLVAVLTRVIEETEERLSKVSFRGLRRQVSASELHTSGILGPETLRDLAQGTKTLQEVTEMDSVKRYLEGTSCIAGVLVPAKDQPGRQEKMSIYQAMWKGVLRPGTALVLLEAQAATGFVIDPVRNLRLSVEEAVAAGVVGGEIQEKLLSAERAVTGYTDPYTGQQISLFQAMQKDLIVREHGIRLLEAQIATGGVIDPVHSHRVPVDVAYRRGYFDEEMNRVLADPSDDTKGFFDPNTHENLTYVQLLRRCVPDPDTGLYMLQLAGRGSAVHQLSEELRCALRDARVTPGSGALQGQSVSVWELLFYREVSEDRRQDLLSRYRAGTLTVEELGATLTSLLAQAQAQARAEAEAGSPRPDPREALRAATMEVKVGRLRGRAVPVWDVLASGYVSGAAREELLAEFGSGTLDLPALTRRLTAIIEEAEEAPGARPQLQDAWRGPREPGPAGRGDGDSGRSQREGQGEGETQEAAAAAAAARRQEQTLRDATMEVQRGQFQGRPVSVWDVLFSSYLSEARRDELLAQHAAGALGLPDLVAVLTRVIEETEERLSKVSFRGLRRQVSASELHTSGILGPETLRDLAQGTKTLQEVTEMDSVKRYLEGTSCIAGVLVPAKDQPGRQEKMSIYQAMWKGVLRPGTALVLLEAQAATGFVIDPVRNLRLSVEEAVAAGVVGGEIQEKLLSAERAVTGYTDPYTGQQISLFQAMQKDLIVREHGIRLLEAQIATGGVIDPVHSHRVPVDVAYRRGYFDEEMNRVLADPSDDTKGFFDPNTHENLTYLQLLQRATLDPETGLLFLSLSLQ

SEQ ID NO: 52 - protein, 1179 aa, Homo sapiens
MAACGRVRRMFRLSAALHLLLLFAAGAEKLPGQGVHSQGQGPGANFVSFVGQAGGGGPAGQQLPQLPQSSQLQQQQQQQQQQQQPQPPQPPFPAGGPPARRGGAGAGGGWKLAEEESCREDVTRVCPKHTWSNNLAVLECLQDVREPENEISSDCNHLLWNYKLNLTTDPKFESVAREVCKSTITEIKECADEPVGKGYMVSCLVDHRGNITEYQCHQYITKMTAIIFSDYRLICGFMDDCKNDINILKCGSIRLGEKDAHSQGEVVSCLEKGLVKEAEEREPKIQVSELCKKAILRVAELSSDDFHLDRHLYFACRDDRERFCENTQAGEGRVYKCLFNHKFEESMSEKCREALTTRQKLIAQDYKVSYSLAKSCKSDLKKYRCNVENLPRSREARLSYLLMCLESAVHRGRQVSSECQGEMLDYRRMLMEDFSLSPEIILSCRGEIEHHCSGLHRKGRTLHCLMKVVRGEKGNLGMNCQQALQTLIQETDPGADYRIDRALNEACESVIQTACKHIRSGDPMILSCLMEHLYTEKMVEDCEHRLLELQYFISRDWKLDPVLYRKCQGDASRLCHTHGWNETSEFMPQGAVFSCLYRHAYRTEEQGRRLSRECRAEVQRILHQRAMDVKLDPALQDKCLIDLGKWCSEKTETGQELECLQDHLDDLVVECRDIVGNLTELESEDIQIEALLMRACEPIIQNFCHDVADNQIDSGDLMECLIQNKHQKDMNEKCAIGVTHFQLVQMKDFRFSYKFKMACKEDVLKLCPNIKKKVDVVICLSTTVRNDTLQEAKEHRVSLKCRRQLRVEELEMTEDIRLEPDLYEACKSDIKNFCSAVQYGNAQIIECLKENKKQLSTRCHQKVFKLQETEMMDPELDYTLMRVCKQMIKRFCPEADSKTMLQCLKQNKNSELMDPKCKQMITKRQITQNTDYRLNPMLRKACKADIPKFCHGILTKAKDDSELEGQVISCLKLRYADQRLSSDCEDQIRIIIQESALDYRLDPQLQLHCSDEISSLCAEEAAAQEQTGQVEECLKVNLLKIKTELCKKEVLNMLKESKADIFVDPVLHTACALDIKHHCAAITPGRGRQMSCLMEALEDKRVRLQPECKKRLNDRIEMWSYAAKVAPADGFSDLAMQVMTSPSKNYILSVISGSICILFLIGLMCGRITKRVTRELKDR

SEQ ID NO: 53 - protein, 1179 aa, Homo sapiens
MAACGRVRRMFRLSAALHLLLLFAAGAEKLPGHGVHSQGQGPGANFVSFVGQAGGGGPAGQQLPQLLQSSQLQQQQQQQQQQQQLQPPQPPFPAGGPPARRGGAGAGGGWKLAEEESCREDVTRVCPKHTWSNNLAVLECLQDVREPENEISSDCNHLLWNYKLNLTTDPKFESVAREVCKSTITEIKECADEPVGKGYMVSCLVDHRGNITEYQCHQYITKMTAIIFSDYRLICGFMDDCKNDINILKCGSIRLGEKDAHSQGEVVSCLEKGLVKEAEEREPKIQVSELCKKAILRVAELSSDDFHLDRHLYFACRDDRERFCENTQAGEGRVYKCLFNHKFEESMSEKCREALTTRQKLIAQDYKVSYSLAKSCKSDLKKYRCNVENLPRSREARLSYLLMCLESAVHRGRQVSSECQGEMLDYRRMLMEDFSLSPEIILSCRGEIEHHCSGLHRKGRTLHCLMKVVRGEKGNLGMNCQQALQTLIQETDPGADYRIDRALNEACESVIQTACKHIRSGDPMILSCLMEHLYTEKMVEDCEHRLLELQYFISRDWKLDPVLYRKCQGDASRLCHTHGWNETSEFMPQGAVFSCLYRHAYRTEEQGRRLSRECRAEVQRILHQRAMDVKLDPALQDKCLIDLGKWCSEKTETGQELECLQDHLDDLVVECRDIVGNLTELESEDIQIEALLMRACEPIIQNFCHDVADNQIDSGDLMECLIQNKHQKDMNEKCAIGVTHFQLVQMKDFRFSYKFKMACKEDVLKLCPNIKKKVDVVICLSTTVRNDTLQEAKEHRVSLKCRRQLRVEELEMTEDIRLEPDLYEACKSDIKNFCSAVQYGNAQIIECLKENKKQLSTRCHQKVFKLQETEMMDPELDYTLMRVCKQMIKRFCPEADSKTMLQCLKQNKNSELMDPKCKQMITKRQITQNTDYRLNPMLRKACKADIPKFCHGILTKAKDDSELEGQVISCLKLRYADQRLSSDCEDQIRIIIQESALDYRLDPQLQLHCSDEISSLCAEEAAAQEQTGQVEECLKVNLLKIKTELCKKEVLNMLKESKADIFVDPVLHTACALDIKHHCAAITPGRGRQMSCLMEALEDKRVRLQPECKKRLNDRIEMWSYAAKVAPADGFSDLAMQVMTSPSKNYILSVISGSICILFLIGLMCGRITKRVTRELKDR

SEQ ID NO: 54 - protein, 253 aa, Homo sapiens
MGEFNEKKTTCGTVCLKYLLFTYNCCFWLAGLAVMAVGIWTLALKSDYISLLASGTYLATAYILVVAGTVVMVTGVLGCCATFKERRNLLRLYFILLLIIFLLEIIAGILAYAYYQQLNTELKENLKDTMTKRYHQPGHEAVTSAVDQLQQEFHCCGSNNSQDWRDSEWIRSQEAGGRVVPDSCCKTVVALCGQRDHASNIYKVEGGCITKLETFIQEHLRVIGAVGIGIACVQVFGMIFTCCLYRSLKLEHY

SEQ ID NO: 55 - protein, 253 aa, Homo sapiens [sequence omitted]

SEQ ID NO: 56 - protein, 541 aa, Homo sapiens
MVADPPRDSKGLAAAEPTANGGLALASIEDQGAAAGGYCGSRDQVRRCLRANLLVLLTVVAVVAGVALGLGVSGAGGALALGPERLSAFVFPGELLLRLLRMIILPLVVCSLIGGAASLDPGALGRLGAWALLFFLVTTLLASALGVGLALALQPGAASAAINASVGAAGSAENAPSKEVLDSFLDLARNIFPSNLVSAAFRSYSTTYEERNITGTRVKVPVGQEVEGMNILGLVVFAIVFGVALRKLGPEGELLIRFFNSFNEATMVLVSWIMWYAPVGIMFLVAGKIVEMEDVGLLFARLGKYILCCLLGHAIHGLLVLPLIYFLFTRKNPYRFLWGIVTPLATAFGTSSSSATLPLMMKCVEENNGVAKHISRFILPIGATVNMDGAALFQCVAAVFIAQLSQQSLDFVKIITILVTATASSVGAAGIPAGGVLTLAIILEAVNLPVDHISLILAVDWLVDRSCTVLNVEGDALGAGLLQNYVDRTESRSTEPELIQVKSELPLDPLPVPTEEGNPLLKHYRGPAGDATVASEKESVM

SEQ ID NO: 57 - protein, 760 aa, Homo sapiens
MMDQARSAFSNLFGGEPLSYTRFSLARQVDGDNSHVEMKLAVDEEENADNNTKANVTKPKRCSGSICYGTIAVIVFFLIGFMIGYLGYCKGVEPKTECERLAGTESPVREEPGEDFPAARRLYWDDLKRKLSEKLDSTDFTSTIKLLNENSYVPREAGSQKDENLALYVENQFREFKLSKVWRDQHFVKIQVKDSAQNSVIIVDKNGRLVYLVENPGGYVAYSKAATVTGKLVHANFGTKKDFEDLYTPVNGSIVIVRAGKITFAEKVANAESLNAIGVLIYMDQTKFPIVNAELSFFGHAHLGTGDPYTPGFPSFNHTQFPPSRSSGLPNIPVQTISRAAAEKLFGNMEGDCPSDWKTDSTCRMVTSESKNVKLTVSNVLKEIKILNIFGVIKGFVEPDHYVVVGAQRDAWGPGAAKSGVGTALLLKLAQMFSDMVLKDGFQPSRSIIFASWSAGDFGSVGATEWLEGYLSSLHLKAFTYINLDKAVLGTSNFKVSASPLLYTLIEKTMQNVKHPVTGQFLYQDSNWASKVEKLTLDNAAFPFLAYSGIPAVSFCFCEDTDYPYLGTTMDTYKELIERIPELNKVARAAAEVAGQFVIKLTHDVELNLDYERYNSQLLSFVRDLNQYRADIKEMGLSLQWLYSARGDFFRATSRLTTDFGNAEKTDRFVMKKLNDRVMRVEYHFLSPYVSPKESPFRHVFWGSGSHTLPALLENLKLRKQNNGAFNETLFRNQLALATWTIQGAANALSGDVWDIDNEF

SEQ ID NO: 58 - protein, 589 aa, Homo sapiens
MRPLPGALGVAAAAALWLLLLLLPRTRADEHEHTYQDKEEVVLWMNTVGPYHNRQETYKYFSLPFCVGSKKSISHYHETLGEALQGVELEFSGLDIKFKDDVMPATYCEIDLDKEKRDAFVYAIKNHYWYQMYIDDLPIWGIVGEADENGEDYYLWTYKKLEIGFNGNRIVDVNLTSEGKVKLVPNTKIQMSYSVKWKKSDVKFEDRFDKYLDPSFFQHRIHWFSIFNSFMMVIFLVGLVSMILMRTLRKDYARYSKEEEMDDMDRDLGDEYGWKQVHGDVFRPSSHPLIFSSLIGSGCQIFAVSLIVIIVAMIEDLYTERGSMLSTAIFVYAATSPVNGYFGGSLYARQGGRRWIKQMFIGAFLIPAMVCGTAFFINFIAIYYHASRAIPFGTMVAVCCICFFVILPLNLVGTILGRNLSGQPNFPCRVNAVPRPIPEKKWFMEPAVIVCLGGILPFGSIFIEMYFIFTSFWAYKIYYVYGFMMLVLVILCIVTVCVTIVCTYFLLNAEDYRWQWTSFLSAASTAIYVYMYSFYYYFFKTKMYGLFQTSFYFGYMAVFSTALGIMCGAIGYMGTSAFVRKIYTNVKID

SEQ ID NO: 59 - protein, 545 aa, Homo sapiens
MNTVGPYHNRQETYKYFSLPFCVGSKKSISHYHETLGEALQGVELEFSGLDIKFKDDVMPATYCEIDLDKEKRDAFVYAIKNHYWYQMYIDDLPIWGIVGEADENGEDYYLWTYKKLEIGFNGNRIVDVNLTSEGKVKLVPNTKIQMSYSVKWKKSDVKFEDRFDKYLDPSFFQHRIHWFSIFNSFMMVIFLVGLVSMILMRTLRKDYARYSKEEEMDDMDRDLGDEYGWKQVHGDVFRPSSHPLIFSSLIGSGCQIFAVSLIVIIVAMIEDLYTERGSMLSTAIFVYAATSPVNGYFGGSLYARQGGRRWIKQMFIGAFLIPAMVCGTAFFINFIAIYYHASRAIPFGTMVAVCCICFFVILPLNLVGTILGRNLSGQPNFPCRVNAVPRPIPEKKWFMEPAVIVCLGGILPFGSIFIEMYFIFTSFWAYKIYYVYGFMMLVLVILCIVTVCVTIVCTYFLLNAEDYRWQWTSFLSAASTAIYVYMYSFYYYFFKTKMYGLFQTSFYFGYMAVFSTALGIMCGAIGYMGTSAFVRKIYTNVKID

SEQ ID NO: 60 - protein, 1212 aa, Homo sapiens
MEPRPTAPSSGAPGLAGVGETPSAAALAAARVELPGTAVPSVPEDAAPASRDGGGVRDEGPAAAGDGLGRPLGPTPSQSRFQVDLVSENAGRAAAAAAAAAAAAAAAGAGAGAKQTPADGEASGESEPAKGSEEAKGRFRVNFVDPAASSSAEDSLSDAAGVGVDGPNVSFQNGGDTVLSEGSSLHSGGGGGSGHHQHYYYDTHTNTYYLRTFGHNTMDAVPRIDHYRHTAAQLGEKLLRPSLAELHDELEKEPFEDGFANGEESTPTRDAVVTYTAESKGVVKFGWIKGVLVRCMLNIWGVMLFIRLSWIVGQAGIGLSVLVIMMATVVTTITGLSTSAIATNGFVRGGGAYYLISRSLGPEFGGAIGLIFAFANAVAVAMYVVGFAETVVELLKEHSILMIDEINDIRIIGAITVVILLGISVAGMEWEAKAQIVLLVILLLAIGDFVIGTFIPLESKKPKGFFGYKSEIFNENFGPDFREEETFFSVFAIFFPAATGILAGANISGDLADPQSAIPKGTLLAILITTLVYVGIAVSVGSCVVRDATGNVNDTIVTELTNCTSAACKLNFDFSSCESSPCSYGLMNNFQVMSMVSGFTPLISAGIFSATLSSALASLVSAPKIFQALCKDNIYPAFQMFAKGYGKNNEPLRGYILTFLIALGFILIAELNVIAPIISNFFLASYALINFSVFHASLAKSPGWRPAFKYYNMWISLLGAILCCIVMFVINWWAALLTYVIVLGLYIYVTYKKPDVNWGSSTQALTYLNALQHSIRLSGVEDHVKNFRPQCLVMTGAPNSRPALLHLVHDFTKNVGLMICGHVHMGPRRQAMKEMSIDQAKYQRWLIKNKMKAFYAPVHADDLREGAQYLMQAAGLGRMKPNTLVLGFKKDWLQADMRDVDMYINLFHDAFDIQYGVVVIRLKEGLDISHLQGQEELLSSQEKSPGTKDVVVSVEYSKKSDLDTSKPLSEKPITHKVEEEDGKTATQPLLKKESKGPIVPLNVADQKLLEASTQFQKKQGKNTIDVWWLFDDGGLTLLIPYLLTTKKKWKDCKIRVFIGGKINRIDHDRRAMATLLSKFRIDFSDIMVLGDINTKPKKENIIAFEEIIEPYRLHEDDKEQDIADKMKEDEPWRITDNELELYKTKTYRQIRLNELLKEHSSTANIIVMSLPVARKGAVSSALYMAWLEALSKDLPPILLVRGNHQSVLTFYS

SEQ ID NO: 61 - protein, 1066 aa, Homo sapiens
MGPGPSRAPRAPRLMLCALALMVAAGGCVVSAFNLDTRFLVVKEAGNPGSLFGYSVALHRQTERQQRYLLLAGAPRELAVPDGYTNRTGAVYLCPLTAHKDDCERMNITVKNDPGHHIIEDMWLGVTVASQGPAGRVLVCAHRYTQVLWSGSEDQRRMVGKCYVRGNDLELDSSDDWQTYHNEMCNSNTDYLETGMCQLGTSGGFTQNTVYFGAPGAYNWKGNSYMIQRKEWDLSEYSYKDPEDQGNLYIGYTMQVGSFILHPKNITIVTGAPRHRHMGAVFLLSQEAGGDLRRRQVLEGSQVGAYFGSAIALADLNNDGWQDLLVGAPYYFERKEEVGGAIYVFMNQAGTSFPAHPSLLLHGPSGSAFGLSVASIGDINQDGFQDIAVGAPFEGLGKVYIYHSSSKGLLRQPQQVIHGEKLGLPGLATFGYSLSGQMDVDENFYPDLLVGSLSDHIVLLRARPVINIVHKTLVPRPAVLDPALCTATSCVQVELCFAYNQSAGNPNYRRNITLAYTLEADRDRRPPRLRFAGSESAVFHGFFSMPEMRCQKLELLLMDNLRDKLRPIIISMNYSLPLRMPDRPRLGLRSLDAYPILNQAQALENHTEVQFQKECGPDNKCESNLQMRAAFVSEQQQKLSRLQYSRDVRKLLLSINVTNTRTSERSGEDAHEALLTLVVPPALLLSSVRPPGACQANETIFCELGNPFKRNQRMELLIAFEVIGVTLHTRDLQVQLQLSTSSHQDNLWPMILTLLVDYTLQTSLSMVNHRLQSFFGGTVMGESGMKTVEDVGSPLKYEFQVGPMGEGLVGLGTLVLGLEWPYEVSNGKWLLYPTEITVHGNGSWPCRPPGDLINPLNLTLSDPGDRPSSPQRRRRQLDPGGGQGPPPVTLAAAKKAKSETVLTCATGRAHCVWLECPIPDAPVVTNVTVKARVWNSTFIEDYRDFDRVRVNGWATLFLRTSIPTINMENKTTWFSVDIDSELVEELPAEIELWLVLVAVGAGLLLLGLIILLLWKCDFFKRTRYYQIMPKYHAVRIREEERYPPPGSTLPTKKHWVTSWQTRDQYY

SEQ ID NO: 62 - protein, 1051 aa, Homo sapiens
MGPGPSRAPRAPRLMLCALALMVAAGGCVVSAFNLDTRFLVVKEAGNPGSLFGYSVALHRQTERQQRYLLLAGAPRELAVPDGYTNRTGAVYLCPLTAHKDDCERMNITVKNDPGHHIIEDMWLGVTVASQGPAGRVLVCAHRYTQVLWSGSEDQRRMVGKCYVRGNDLELDSSDDWQTYHNEMCNSNTDYLETGMCQLGTSGGFTQNTVYFGAPGAYNWKGNSYMIQRKEWDLSEYSYKDPEDQGNLYIGYTMQVGSFILHPKNITIVTGAPRHRHMGAVFLLSQEAGGDLRRRQVLEGSQVGAYFGSAIALADLNNDGWQDLLVGAPYYFERKEEVGGAIYVFMNQAGTSFPAHPSLLLHGPSGSAFGLSVASIGDINQDGFQDIAVGAPFEGLGKVYIYHSSSKGLLRQPQQVIHGEKLGLPGLATFGYSLSGQMDVDENFYPDLLVGSLSDHIVLLRARPVINIVHKTLVPRPAVLDPALCTATSCVQVELCFAYNQSAGNPNYRRNITLAYTLEADRDRRPPRLRFAGSESAVFHGFFSMPEMRCQKLELLLMDNLRDKLRPIIISMNYSLPLRMPDRPRLGLRSLDAYPILNQAQALENHTEVQFQKECGPDNKCESNLQMRAAFVSEQQQKLSRLQYSRDVRKLLLSINVTNTRTSERSGEDAHEALLTLVVPPALLLSSVRPPGACQANETIFCELGNPFKRNQRMELLIAFEVIGVTLHTRDLQVQLQLSTSSHQDNLWPMILTLLVDYTLQTSLSMVNHRLQSFFGGTVMGESGMKTVEDVGSPLKYEFQVGPMGEGLVGLGTLVLGLEWPYEVSNGKWLLYPTEITVHGNGSWPCRPPGDLINPLNLTLSDPGDRPSSPQRRRRQLDPGGGQGPPPVTLAAAKKAKSETVLTCATGRAHCVWLECPIPDAPVVTNVTVKARVWNSTFIEDYRDFDRVRVNGWATLFLRTSIPTINMENKTTWFSVDIDSELVEELPAEIELWLVLVAVGAGLLLLGLIILLLWKCGFFKRARTRALYEAKRQKAEMKSQPSETERLTDDY

SEQ ID NO: 63 - protein, 1066 aa, Homo sapiens
MGPGPSRAPRAPRLMLCALALMVAAGGCVVSAFNLDTRFLVVKEAGNPGSLFGYSVALHRQTERQQRYLLLAGAPRELAVPDGYTNRTGAVYLCPLTAHKDDCERMNITVKNDPGHHIIEDMWLGVTVASQGPAGRVLVCAHRYTQVLWSGSEDQRRMVGKCYVRGNDLELDSSDDWQTYHNEMCNSNTDYLETGMCQLGTSGGFTQNTVYFGAPGAYNWKGNSYMIQRKEWDLSEYSYKDPEDQGNLYIGYTMQVGSFILHPKNITIVTGAPRHRHMGAVFLLSQEAGGDLRRRQVLEGSQVGAYFGSAIALADLNNDGWQDLLVGAPYYFERKEEVGGAIYVFMNQAGTSFPAHPSLLLHGPSGSAFGLSVASIGDINQDGFQDIAVGAPFEGLGKVYIYHSSSKGLLRQPQQVIHGEKLGLPGLATFGYSLSGQMDVDENFYPDLLVGSLSDHIVLLRARPVINIVHKTLVPRPAVLDPALCTATSCVQVELCFAYNQSAGNPNYRRNITLAYTLEADRDRRPPRLRFAGSESAVFHGFFSMPEMRCQKLELLLMDNLRDKLRPIIISMNYSLPLRMPDRPRLGLRSLDAYPILNQAQALENHTEVQFQKECGPDNKCESNLQMRAAFVSEQQQKLSRLQYSRDVRKLLLSINVTNTRTSERSGEDAHEALLTLVVPPALLLSSVRPPGACQANETIFCELGNPFKRNQRMELLIAFEVIGVTLHTRDLQVQLQLSTSSHQDNLWPMILTLLVDYTLQTSLSMVNHRLQSFFGGTVMGESGMKTVEDVGSPLKYEFQVGPMGEGLVGLGTLVLGLEWPYEVSNGKWLLYPTEITVHGNGSWPCRPPGDLINPLNLTLSDPGDRPSSPQRRRRQLDPGGGQGPPPVTLAAAKKAKSETVLTCATGRAHCVWLECPIPDAPVVTNVTVKARVWNSTFIEDYRDFDRVRVNGWATLFLRTSIPTINMENKTTWFSVDIDSELVEELPAEIELWLVLVAVGAGLLLLGLIILLLWKCGFFKRTRYYQIMPKYHAVRIREEERYPPPGSTLPTKKHWVTSWQTRDQYY

SEQ ID NO: 64 - protein, 513 aa, Homo sapiens
MAPARTMARARLAPAGIPAVALWLLCTLGLQGTQAGPPPAPPGLPAGADCLNSFTAGVPGFVLDTNASVSNGATFLESPTVRRGWDCVRACCTTQNCNLALVELQPDRGEDAIAACFLINCLYEQNFVCKFAPREGFINYLTREVYRSYRQLRTQGFGGSGIPKAWAGIDLKVQPQEPLVLKDVENTDWRLLRGDTDVRVERKDPNQVELWGLKEGTYLFQLTVTSSDHPEDTANVTVTVLSTKQTEDYCLASNKVGRCRGSFPRWYYDPTEQICKSFVYGGCLGNKNNYLREEECILACRGVQGPSMERRHPVCSGTCQPTQFRCSNGCCIDSFLECDDTPNCPDASDEAACEKYTSGFDELQRIHFPSDKGHCVDLPDTGLCKESIPRWYYNPFSEHCARFTYGGCYGNKNNFEEEQQCLESCRGISKKDVFGLRREIPIPSTGSVEMAVAVFLVICIVVVVAILGYCFFKNQRKDFHGHHHHPPPTPASSTVSTTEDTEHLVYNHTTRPL

SEQ ID NO: 65 - protein, 252 aa, Homo sapiens
MAQLCGLRRSRAFLALLGSLLLSGVLAADRERSIHDFCLVSKVVGRCRASMPRWWYNVTDGSCQLFVYGGCDGNSNNYLTKEECLKKCATVTENATGDLATSRNAADSSVPSAPRRQDSEDHSSDMFNYEEYCTANAVTGPCRASFPRWYFDVERNSCNNFIYGGCRGNKNSYRSEEACMLRCFRQQENPPLPLGSKVVVLAGLFVMVLILFLGASMVYLIRVARRNQERALRTVWSSGDDKEQLVKNTYVL

SEQ ID NO: 66 - protein, 197 aa, Homo sapiens [sequence omitted]

SEQ ID NO: 67 - protein, 388 aa, Homo sapiens
MSILKIHARELFDSRGNPTVEVDLFTSEGLFRAAVPSGASTGIYEVLELQDNDKTRYMGKGVSKPVEPINKTIAPVLVSKKLNVTEQEKIDKLMIEMDGTENKSKFGANAILGVSLAACKASAVEKGVPLYHHIADLSGNSKVILPVPVFNVINGSSHAVTKLAMQEFMVLPVGAANFREAMPIGAEVYHSLKNVIKEKYGKDATGVGDGGAFAPNILENKEGLELLKTAIGKAGYTDKVIVSMDVEASEFFRSGKYDLEFKFLDDPTRYISPDCLADLYKSFIKNYPVVSTEDPFDQDDWGAWQKFTASAGIQVVEDDLRVTNPKRTASAVNEKKCNCLLLKVNQIRSVTESLQACKLAQANGWCVMVPHHSGETENTFITDLVVGL

SEQ ID NO: 68 - protein, 434 aa, Homo sapiens
MAMQKIFAREILDSRGNPTVEVDLHTAKGRFRAAVPSGASTGIYEALELRDGDKGRYLGKGVLKAVENINNTLGPALLQKKLSVVDQEKVDKFMIELDGTENKSKFGANAILGVSLAVCKAGAAEKGVPLYRHIADLAGNPDLILPVPAFNVINGGSHAGNKLAMQEFMILPVGASSFKEAMRIGAEVYHHLKGVIKAKYGKDATNVGDEGGFAPNILENNEALELLKTAIQAAGYPDKVVIGMDVAASEFYRNGKYDLDFKSPDDPARHITGEKLGELYKSFIKNYPVVSIEDPFDQDDWATWTSFLSGVNIQIVGDDLTVTNPKRIAQAVEKKACNCLLLKVNQIGSVTESIQACKLAQSNGWGVMVSHRSGETEDTFIADLVVGLCTGQIKTGAPCRSERLAKYNQLMRIEEALGDKAIFAGRKFRNPKAK

SEQ ID NO: 69 - protein, 341 aa, Homo sapiens
MIELDGTENKSKFGANAILGVSLAVCKAGAAEKGVPLYRHIADLAGNPDLILPVPAFNVINGGSHAGNKLAMQEFMILPVGASSFKEAMRIGAEVYHHLKGVIKAKYGKDATNVGDEGGFAPNILENNEALELLKTAIQAAGYPDKVVIGMDVAASEFYRNGKYDLDFKSPDDPARHITGEKLGELYKSFIKNYPVVSIEDPFDQDDWATWTSFLSGVNIQIVGDDLTVTNPKRIAQAVEKKACNCLLLKVNQIGSVTESIQACKLAQSNGWGVMVSHRSGETEDTFIADLVVGLCTGQIKTGAPCRSERLAKYNQLMRIEEALGDKAIFAGRKFRNPKAK

SEQ ID NO: 70 - protein, 434 aa, Homo sapiens
MSIEKIWAREILDSRGNPTVEVDLYTAKGLFRAAVPSGASTGIYEALELRDGDKQRYLGKGVLKAVDHINSTIAPALISSGLSVVEQEKLDNLMLELDGTENKSKFGANAILGVSLAVCKAGAAERELPLYRHIAQLAGNSDLILPVPAFNVINGGSHAGNKLAMQEFMILPVGAESFRDAMRLGAEVYHTLKGVIKDKYGKDATNVGDEGGFAPNILENSEALELVKEAIDKAGYTEKIVIGMDVAASEFYRDGKYDLDFKSPTDPSRYITGDQLGALYQDFVRDYPVVSIEDPFDQDDWAAWSKFTANVGIQIVGDDLTVTNPKRIERAVEEKACNCLLLKVNQIGSVTEAIQACKLAQENGWGVMVSHRSGETEDTFIADLVVGLCTGQIKTGAPCRSERLAKYNQLMRIEEELGDEARFAGHNFRNPSVL

SEQ ID NO: 71 - protein, 323 aa, Homo sapiens
MARGPGLAPPPLRLPLLLLVLAAVTGHTAAQDNCTCPTNKMTVCSPDGPGGRCQCRALGSGMAVDCSTLTSKCLLLKARMSAPKNARTLVRPSEHALVDNDGLYDPDCDPEGRFKARQCNQTSVCWCVNSVGVRRTDKGDLSLRCDELVRTHHILIDLRHRPTAGAFNHSDLDAELRRLFRERYRLHPKFVAAVHYEQPTIQIELRQNTSQKAAGEVDIGDAAYYFERDIKGESLFQGRGGLDLRVRGEPLQVERTLIYYLDEIPPKFSMKRLTAGLIAVIVVVVVALVAGMAVLVITNRRKSGKYKKVEIKELGELRKEPSL

SEQ ID NO: 72 - protein, 434 aa, Homo sapiens
MSILKIHAREIFDSRGNPTVEVDLFTSKGLFRAAVPSGASTGIYEALELRDNDKTRYMGKGVSKAVEHINKTIAPALVSKKLNVTEQEKIDKLMIEMDGTENKSKFGANAILGVSLAVCKAGAVEKGVPLYRHIADLAGNSEVILPVPAFNVINGGSHAGNKLAMQEFMILPVGAANFREAMRIGAEVYHNLKNVIKEKYGKDATNVGDEGGFAPNILENKEGLELLKTAIGKAGYTDKVVIGMDVAASEFFRSGKYDLDFKSPDDPSRYISPDQLADLYKSFIKDYPVVSIEDPFDQDDWGAWQKFTASAGIQVVGDDLTVTNPKRIAKAVNEKSCNCLLLKVNQIGSVTESLQACKLAQANGWGVMVSHRSGETEDTFIADLVVGLCTGQIKTGAPCRSERLAKYNQLLRIEEELGSKAKFAGRNFRNPLAK

SEQ ID NO: 73 - protein, 659 aa, Homo sapiens
MGKLKLQSIRSVMQKYLEDRGEVTFEKIFSQKLGYLLFRDFCLNHLEEARPLVEFYEEIKKYEKLETEEERVARSREIFDSYIMKELLACSHPFSKSATEHVQGHLGKKQVPPDLFQPYIEEICQNLRGDVFQKFIESDKFTRFCQWKNVELNIHLTMNDFSVHRIIGRGGFGEVYGCRKADTGKMYAMKCLDKKRIKMKQGETLALNERIMLSLVSTGDCPFIVCMSYAFHTPDKLSFILDLMNGGDLHYHLSQHGVFSEADMRFYAAEIILGLEHMHNRFVVYRDLKPANILLDEHGHVRISDLGLACDFSKKKPHASVGTHGYMAPEVLQKGVAYDSSADWFSLGCMLFKLLRGHSPFRQHKTKDKHEIDRMTLTMAVELPDSFSPELRSLLEGLLQRDVNRRLGCLGRGAQEVKESPFFRSLDWQMVFLQKYPPPLIPPRGEVNAADAFDIGSFDEEDTKGIKLLDSDQELYRNFPLTISERWQQEVAETVFDTINAETDRLEARKKAKNKQLGHEEDYALGKDCIMHGYMSKMGNPFLTQWQRRYFYLFPNRLEWRGEGEAPQSLLTMEEIQSVEETQIKERKCLLLKIRGGKQFILQCDSDPELVQWKKELRDAYREAQQLVQRVPKMKNKPRSPVVELSKVPLVQRGSANGL

SEQ ID NO: 74 - protein, 647 aa, Homo sapiens
MQKYLEDRGEVTFEKIFSQKLGYLLFRDFCLNHLEEARPLVEFYEEIKKYEKLETEEERVARSREIFDSYIMKELLACSHPFSKSATEHVQGHLGKKQVPPDLFQPYIEEICQNLRGDVFQKFIESDKFTRFCQWKNVELNIHLTMNDFSVHRIIGRGGFGEVYGCRKADTGKMYAMKCLDKKRIKMKQGETLALNERIMLSLVSTGDCPFIVCMSYAFHTPDKLSFILDLMNGGDLHYHLSQHGVFSEADMRFYAAEIILGLEHMHNRFVVYRDLKPANILLDEHGHVRISDLGLACDFSKKKPHASVGTHGYMAPEVLQKGVAYDSSADWFSLGCMLFKLLRGHSPFRQHKTKDKHEIDRMTLTMAVELPDSFSPELRSLLEGLLQRDVNRRLGCLGRGAQEVKESPFFRSLDWQMVFLQKYPPPLIPPRGEVNAADAFDIGSFDEEDTKGIKLLDSDQELYRNFPLTISERWQQEVAETVFDTINAETDRLEARKKAKNKQLGHEEDYALGKDCIMHGYMSKMGNPFLTQWQRRYFYLFPNRLEWRGEGEAPQSLLTMEEIQSVEETQIKERKCLLLKIRGGKQFILQCDSDPELVQWKKELRDAYREAQQLVQRVPKMKNKPRSPVVELSKVPLVQRGSANGL

SEQ ID NO: 75 - protein, 146 aa, Homo sapiens
MPDAALSLMRSPRNCRESLPVLLFLCLLLKTCEPKTANAFKPNILLIMADDLGIGDLGCYGNNTLRMPNIDQLAEEGVRLTQHLAATLLCTPSRAAFLMGRHSFRSGMDASNGYWALQWNAGSGGSLRTKPLLQESCSTATMQLAS

SEQ ID NO: 76 - protein, 426 aa, Homo sapiens [sequence omitted]

SEQ ID NO: 77 - protein, 593 aa, Homo sapiens [sequence omitted]

SEQ ID NO: 78 - protein, 557 aa, Homo sapiens [sequence omitted]

SEQ ID NO: 79 - protein, 181 aa, Homo sapiens
MRSAARRGRAAPAARDSLPVLLFLCLLLKTCEPKTANAFKPNILLIMADDLGTGDLGCYGNNTLRTPNIDQLAEEGVRLTQHLAAAPLCTPSRAAFLTGRHSFRSGMDASNGYRALQWNAGSGGLPENETTFARILQQHGYATGLIGVDMWEPHIIRWLGIFVIKKIPGQAWWRTPVVPAT

SEQ ID NO: 80 - protein, 382 aa, Homo sapiens
MRSAARRGRAAPAARDSLPVLLFLCLLLKTCEPKTANAFKPNILLIMADDLGTGDLGCYGNNTLRTPNIDQLAEEGVRLTQHLAAAPLCTPSRAAFLTGRHSFRSGMDASNGYRALQWNAGSGGLPENETTFARILQQHGYATGLIGKWHQGVNCASRGDHCHHPLNHGFDYFYGMPFTLTNDCDPGRPPEVDAALRAQLWGYTQFLALGILTLAAGQTCGFFCVSARAVTGMAGVGCLFFISWYSSFGFVRRWNCILMRNHDVTEQPMVLEKTASLMLKEAVSYIERHKHGPFLLFLSLLHVHIPLVTTSAFLGKSQHGLYGDNVEEMDWLIASDFMSSSEVTESEAIKLMFRTMQRRCLPSMAFKKPWRGPVRLQILKRA

SEQ ID NO: 81 - protein, 57 aa, Homo sapiens
MFELVICLLLKMHFKYQIYLKDKIASVKLNIILCALGYALKCQFIIPKDVFIDVYQE

SEQ ID NO: 82 - protein, 670 aa, Homo sapiens [sequence omitted]

SEQ ID NO: 83 - protein, 287 aa, Homo sapiens
MIWAECKEIWTQGPKEYLFELWNMLDFGMLAILSASFIARFRAFWHASKAQSITDASDTLKDLTKVTLGDNVKYYSLARREWDPSDPRMVSEGLCAVAVVLSFSGIACILPANESFGPLQMSLGGAVKDIFRFMLIFIMVFVAFMIGMFNLYSYYIDVKQNEAFTTVEESFKTLFWATFVLSAVKSVVINYSHKFIENIGYVLYGVYDVTMVIVLLNMLIAMINSSLQEIEDDADVEWKFARAKLWFSCFGEGRALPVPFNLVPGPGSLFCLLLKLKGWISELYPGS

SEQ ID NO: 84 - protein, 123 aa, Homo sapiens
MAWTIASSSYSSGNMTLMFKPPDVLSSYITSDQLVGRYKSFIKDYSVVSTEDALDQDDRETWQKLSASAGYIHVTGNHLPVPSRKGTTKTTDKDSGNCLLLKVNQTDPMMESLQECKVAQAEG

SEQ ID NO: 85 - protein, 1051 aa, Homo sapiens
MFGRSRSWVGGGHGKTSRNIHSLDHLKYLYHVLTKNTTVTEQNRNLLVETIRSITEILIWGDQNDSSVFDFFLEKNMFVFFLNILRQKSGRYVCVQLLQTLNILFENISHETSLYYLLSNNYVNSIIVHKFDFSDEEIMAYYISFLKTLSLKLNNHTVHFFYNEHTNDFALYTEAIKFFNHPESMVRIAVRTITLNVYKVDNQAMLHYIRDKTAVPYFSNLVWFIGSHVIELDDCVQTDEEHRNRGKLSDLVAEHLDHLHYLNDILIINCEFLNDVLTDHLLNRLFLPLYVYSLENQDKGGERPKISLPVSLYLLSQVFLIIHHAPLVNSLAEVILNGDLSEMYAKTEQDIQRSSAKPSIRCFIKPTETLERSLEMNKHKGKRRVQKRPNYKNVGEEEDEEKGPTEDAQEDAEKAKGTEGGSKGIKTSGESEEIEMVIMERSKLSELAASTSVQEQNTTDEEKSAAATCSESTQWSRPFLDMVYHALDSPDDDYHALFVLCLLYAMSHNKGMDPEKLERIQLPVPNAAEKTTYNHPLAERLIRIMNNAAQPDGKIRLATLELSCLLLKQQVLMSAGCIMKDVHLACLEGAREESVHLVRHFYKGEDIFLDMFEDEYRSMTMKPMNVEYLMMDASILLPPTGTPLTGIDFVKRLPCGDVEKTRRAIRVFFMLRSLSLQLRGEPETQLPLTREEDLIKTDDVLDLNNSDLIACTVITKDGGMVQRFLAVDIYQMSLVEPDVSRLGWGVVKFAGLLQDMQVTGVEDDSRALNITIHKPASSPHSKPFPILQATFIFSDHIRCIIAKQRLAKGRIQARRMKMQRIAALLDLPIQPTTEVLGFGLGSSTSTQHLPFRFYDQGRRGSSDPTVQRSVFASVDKVPGFAVAQCINQHSSPSLSSQSPPSASGSPSGSGSTSHCDSGGTSSSSTPSTAQSPADAPMSPELPKPHLPDQLVIVNETEADSKPSKNVARSAAVETASLSPSLVPARQPTISLLCEDTADTLSVESLTLVPPVDPHSLRSLTGMPPLSTPAAACTEPVGEEAACAEPVGTAED

SEQ ID NO: 86 - protein, 344 aa, Homo sapiens
MRDTEALLWFTQKDGNHTGPEIRTRVKNWYLRMEKARTKWNHERDPRSVGRVGEWAWLASSFLYSSGSNFSSAESNREDLPLAARAFSDEDIVFALAMTKSVISGKFLNLPELLFSLQFNNNNNMRLLWVNERCCFLELRPLSITCLASSASKKCSVLFHLRQKSLSGKRLISHDCTPARLTSQTMQLLCSWEKKDNYLHGQVPVASFPVANYCVVLCVALLGHGSQLLQGVKFEAGEVEKEHRICSQVSKSQVSKEEALTAQCGGRHDGLKEAKTSGRTALFQCLWDAIFQKKLVPATHPRHFEIQQNHHCWQTFAADSLKGYVVILSTRLTQRTMRQGGARV

SEQ ID NO: 87 - protein, 948 aa, Homo sapiens [sequence omitted]

SEQ ID NO: 88 - protein, 243 aa, Homo sapiens [sequence omitted]

SEQ ID NO: 89 - protein, 946 aa, Homo sapiens
MTDSKYFTTTKKGEIFELKAELNSDKKEKKKEAVKKVIASMTVGKDVSALFPDVVNCMQTDNLELKKLVYLYLMNYAKSQPDMAIMAVNTFVKDCEDPNPLIRALAVRTMGCIRVDKITEYLCEPLRKCLKDEDPYVRKTAAVCVAKLHDINAQLVEDQGFLDTLKDLISDSNPMVVANAVAALSEIAESHPSSNLLDLNPQSINKLLTALNECTEWGQIFILDCLANYMPKDDREAQSICERVTPRLSHANSAVVLSAVKVLMKFMEMLSKDLDYYGTLLKKLAPPLVTLLSAEPELQYVALRNINLIVQKRPEILKHEMKVFFVKYNDPIYVKLEKLDIMIRLASQANIAQVLAELKEYATEVDVDFVRKAVRAIGRCAIKVEQSAERCVSTLLDLIQTKVNYVVQEAIVVIKDIFRKYPNKYESVIATLCENLDSLDEPEARAAMIWIVGEYAERIDNADELLESFLEGFHDESTQVQLQLLTAIVKLFLKKPTETQELVQQVLSLATQDSDNPDLRDRGYIYWRLLSTDPVAAKEVVLAEKPLISEETDLIEPTLLDELICYIGTLASVYHKPPSAFVEGGRGVVHKSLPPRTASSESAESPETAPTGAPPGEQPDVIPAQGDLLGDLLNLDLGPPVSGPPLATSSVQMGAVDLLGGGLDSLMGDEPEGIGGTNFVAPPTAAVPANLGAPIGSGLSDLFDLTSGVGTLSGSYVAPKAVWLPAMKAKGLEISGTFTRQVGSISMDLQLTNKALQVMTDFAIQFNRNSFGLAPAAPLQVHAPLSPNQTVEISLPLSTVGSVMKMEPLNNLQVAVKNNIDVFYFSTLYPLHILFVEDGKMDRQMFLATWKDIPNENEAQFQIRDCPLNAEAASSKLQSSNIFTVAKRNVEGQDMLYQSLKLTNGIWVLAELRIQPGNPSCTLSLKCRAPEVSQHVYQAYETILKN

SEQ ID NO: 90 - protein, 937 aa, Homo sapiens
MTDSKYFTTNKKGEIFELKAELNNEKKEKRKEAVKKVIAAMTVGKDVSSLFPDVVNCMQTDNLELKKLVYLYLMNYAKSQPDMAIMAVNSFVKDCEDPNPLIRALAVRTMGCIRVDKITEYLCEPLRKCLKDEDPYVRKTAAVCVAKLHDINAQMVEDQGFLDSLRDLIADSNPMVVANAVAALSEISESHPNSNLLDLNPQNINKLLTALNECTEWGQIFILDCLSNYNPKDDREAQSICERVTPRLSHANSAVVLSAVKVLMKFLELLPKDSDYYNMLLKKLAPPLVTLLSGEPEVQYVALRNINLIVQKRPEILKQEIKVFFVKYNDPIYVKLEKLDIMIRLASQANIAQVLAELKEYATEVDVDFVRKAVRAIGRCAIKVEQSAERCVSTLLDLIQTKVNYVVQEAIVVIRDIFRKYPNKYESIIATLCENLDSLDEPDARAAMIWIVGEYAERIDNADELLESFLEGFHDESTQVQLTLLTAIVKLFLKKPSETQELVQQVLSLATQDSDNPDLRDRGYIYWRLLSTDPVTAKEVVLSEKPLISEETDLIEPTLLDELICHIGSLASVYHKPPNAFVEGSHGIHRKHLPIHHGSTDAGDSPVGTTTATNLEQPQVIPSQGDLLGDLLNLDLGPPVNVPQVSSMQMGAVDLLGGGLDSLVGQSFIPSSVPATFAPSPTPAVVSSGLNDLFELSTGIGMAPGGYVAPKAVWLPAVKAKGLEISGTFTHRQGHIYMEMNFTNKALQHMTDFAIQFNKNSFGVIPSTPLAIHTPLMPNQSIDVSLPLNTLGPVMKMEPLNNLQVAVKNNIDVFYFSCLIPLNVLFVEDGKMERQVFLATWKDIPNENELQFQIKECHLNADTVSSKLQNNNVYTIAKRNVEGQDMLYQSLKLTNGIWILAELRIQPGNPNYTLSLKCRAPEVSQYIYQVYDSILKN

SEQ ID NO: 91 - protein, 935 aa, Homo sapiens [sequence omitted]

SEQ ID NO: 92 - protein, 934 aa, Homo sapiens
MTDSKYFTTNKKGEIFELKAELNNEKKEKRKEAVKKVIAAMTVGKDVSSLFPDVVNCMQTDNLELKKLVYLYLMNYAKSQPDMAIMAVNSFVKDCEDPNPLIRALAVRTMGCIRVDKITEYLCEPLRKCLKDEDPYVRKTAAVCVAKLHDINAQMVEDQGFLDSLRDLIADSNPMVVANAVAALSEISESHPNSNLLDLNPQNINKLLTALNECTEWGQIFILDCLSNYNPKDDREAQSICERVTPRLSHANSAVVLSAVKVLMKFLELLPKDSDYYNMLLKKLAPPLVTLLSGEPEVQYVALRNINLIVQKRPEILKQEIKVFFVKYNDPIYVKLEKLDIMIRLASQANIAQVLAELKEYATEVDVDFVRKAVRAIGRCAIKVEQSAERCVSTLLDLIQTKVNYVVQEAIVVIRDIFRKYPNKYESIIATLCENLDSLDEPDARAAMIWIVGEYAERIDNADELLESFLEGFHDESTQVQLTLLTAIVKLFLKKPSETQELVQQVLSLATQDSDNPDLRDRGYIYWRLLSTDPVTAKEVVLSEKPLISEETDLIEPTLLDELICHIGSLASVYHKPPNAFVEGSHGIHRKHLPIHHGSTDAGDSPVGTTTATNLEQPQVIPSQGDLLGDLLNLDLGPPVNVPQVSSMQMGAVDLLGGGLDSLVGQSFIPSSVPATFAPSPTPAVVSSGLNDLFELSTGIGMAPGGYVAPKAVWLPAVKAKGLEISGTFTHRQGHIYMEMNFTNKALQHMTDFAIQFNFGVIPSTPLAIHTPLMPNQSIDVSLPLNTLGPVMKMEPLNNLQVAVKNNIDVFYFSCLIPLNVLFVEDGKMERQVFLATWKDIPNENELQFQIKECHLNADTVSSKLQNNNVYTIAKRNVEGQDMLYQSLKLTNGIWILAELRIQPGNPNYTLSLKCRAPEVSQYIYQVYDSILKN

SEQ ID NO: 93 - protein, 949 aa, Homo sapiens
MTDSKYFTTNKKGEIFELKAELNNEKKEKRKEAVKKVIAAMTVGKDVSSLFPDVVNCMQTDNLELKKLVYLYLMNYAKSQPDMAIMAVNSFVKDCEDPNPLIRALAVRTMGCIRVDKITEYLCEPLRKCLKDEDPYVRKTAAVCVAKLHDINAQMVEDQGFLDSLRDLIADSNPMVVANAVAALSEISESHPNSNLLDLNPQNINKLLTALNECTEWGQIFILDCLSNYNPKDDREAQSICERVTPRLSHANSAVVLSAVKVLMKFLELLPKDSDYYNMLLKKLAPPLVTLLSGEPEVQYVALRNINLIVQKRPEILKQEIKVFFVKYNDPIYVKLEKLDIMIRLASQANIAQVLAELKEYATEVDVDFVRKAVRAIGRCAIKQSAERCVSTLLDLIQTKVNYVVQEAIVVIRDIFRKYPNKYESIIATLCENLDSLDEPDARAAMIWIVGEYAERIDNADELLESFLEGFHDESTQVQLTLLTAIVKLFLKKPSETQELVQQVLSLATQDSDNPDLRDRGYIYWRLLSTDPVTAKEVVLSEKPLISEETDLIEPTLLDELICHIGSLASVYHKPPNAFVEGSHGIHRKHLPIHHGSTDAGDSPVGTTTATNLEQPQVIPSQGDLLGDLLNLDLGPPVNVPQVSSMQMGAVDLLGGGLDSLLGSDLGGGIGGSPAVGQSFIPSSVPATFAPSPTPAVVSSGLNDLFELSTGIGMAPGGYVAPKAVWLPAVKAKGLEISGTFTHRQGHIYMEMNFTNKALQHMTDFAIQFNKNSFGVIPSTPLAIHTPLMPNQSIDVSLPLNTLGPVMKMEPLNNLQVAVKNNIDVFYFSCLIPLNVLFVEDGKMERQVFLATWKDIPNENELQFQIKECHLNADTVSSKLQNNNVYTIAKRNVEGQDMLYQSLKLTNGIWILAELRIQPGNPNYTLSLKCRAPEVSQYIYQVYDSILKN

SEQ ID NO: 94 - protein, 949 aa, Homo sapiens [sequence omitted]

SEQ ID NO: 95 - protein, 951 aa, Homo sapiens
MTDSKYFTTNKKGEIFELKAELNNEKKEKRKEAVKKVIAAMTVGKDVSSLFPDVVNCMQTDNLELKKLVYLYLMNYAKSQPDMAIMAVNSFVKDCEDPNPLIRALAVRTMGCIRVDKITEYLCEPLRKCLKDEDPYVRKTAAVCVAKLHDINAQMVEDQGFLDSLRDLIADSNPMVVANAVAALSEISESHPNSNLLDLNPQNINKLLTALNECTEWGQIFILDCLSNYNPKDDREAQSICERVTPRLSHANSAVVLSAVKVLMKFLELLPKDSDYYNMLLKKLAPPLVTLLSGEPEVQYVALRNINLIVQKRPEILKQEIKVFFVKYNDPIYVKLEKLDIMIRLASQANIAQVLAELKEYATEVDVDFVRKAVRAIGRCAIKVEQSAERCVSTLLDLIQTKVNYVVQEAIVVIRDIFRKYPNKYESIIATLCENLDSLDEPDARAAMIWIVGEYAERIDNADELLESFLEGFHDESTQVQLTLLTAIVKLFLKKPSETQELVQQVLSLATQDSDNPDLRDRGYIYWRLLSTDPVTAKEVVLSEKPLISEETDLIEPTLLDELICHIGSLASVYHKPPNAFVEGSHGIHRKHLPIHHGSTDAGDSPVGTTTATNLEQPQVIPSQGDLLGDLLNLDLGPPVNVPQVSSMQMGAVDLLGGGLDSLLGSDLGGGIGGSPAVGQSFIPSSVPATFAPSPTPAVVSSGLNDLFELSTGIGMAPGGYVAPKAVWLPAVKAKGLEISGTFTHRQGHIYMEMNFTNKALQHMTDFAIQFNKNSFGVIPSTPLAIHTPLMPNQSIDVSLPLNTLGPVMKMEPLNNLQVAVKNNIDVFYFSCLIPLNVLFVEDGKMERQVFLATWKDIPNENELQFQIKECHLNADTVSSKLQNNNVYTIAKRNVEGQDMLYQSLKLTNGIWILAELRIQPGNPNYTLSLKCRAPEVSQYIYQVYDSILKN

SEQ ID NO: 96 - protein, 321 aa, Homo sapiens
MAMATKGGTVKAASGFNAMEDAQTLRKAMKGLGTDEDAIISVLAYRNTAQRQEIRTAYKSTIGRDLIDDLKSELSGNFEQVIVGMMTPTVLYDVQELRRAMKGAGTDEGCLIEILASRTPEEIRRISQTYQQQYGRSLEDDIRSDTSFMFQRVLVSLSAGGRDEGNYLDDALVRQDAQDLYEAGEKKWGTDEVKFLTVLCSRNRNHLLHVFDEYKRISQKDIEQSIKSETSGSFEDALLAIVKCMRNKSAYFAEKLYKSMKGLGTDDNTLIRVMVSRAEIDMLDIRAHFKRLYGKSLYSFIKGDTSGDYRKVLLVLCGGDD

SEQ ID NO: 97 - protein, 277 aa, Homo sapiens
MFPFYSCWRTGLLLLLLAVAVRESWQTEEKTCDLVGEKGKESEKELALVKRLKPLFNKSFESTVGQGSDTYIYIFRVCREAGNHTSGAGLVQINKSNGKETVVGRLNETHIFNGSNWIMLIYKGGDEYDNHCGKEQRRAVVMISCNRHTLADNFNPVSEERGKVQDCFYLFEMDSSLACSPEISHLSVGSILLVTFASLVAVYVVGGFLYQRLVVGAKGMEQFPHLAFWQDLGNLVADGCDFVCRSKPRNVPAAYRGVGDDQLGEESEERDDHLLPM

SEQ ID NO: 98 - protein, 194 aa, Homo sapiens
MLIYKGGDEYDNHCGKEQRRAVVMISCNRHTLADNFNPVSEERGKVQDCFYLFEMDSSLACSPEISHLSVGSILLVTFASLVAVYVVGGFLYQRLVVGAKGMEQFPHLAFWQDLGNLVAACGFDLFFNLLERERKQKWDIEGSAVLCAGCGMLLHLSLLLAQGSVFLPTFLWGKVFNPLMLPSSCLGHVPRNLD

SEQ ID NO: 99 - protein, 877 aa, Homo sapiens
MLASLYNGSVCVWNHETQTLVKTFEVCDLPVRAAKFVARKNWVVTGADDMQIRVFNYNTLERVHMFEAHSDYIRCIAVHPTQPFILTSSDDMLIKLWDWDKKWSCSQVFEGHTHYVMQIVINPKDNNQFASASLDRTIKVWQLGSSSPNFTLEGHEKGVNCIDYYSGGDKPYLISGADDRLVKIWDYQNKTCVQTLEGHAQNVSCASFHPELPIIITGSEDGTVRIWHSSTYRLESTLNYGMERVWCVASLRGSNNVALGYDEGSIIVKLGREEPAMSMDANGKIIWAKHSEVQQANLKAMGDAEIKDGERLPLAVKDMGSCEIYPQTIQHNPNGRFVVVCGDGEYIIYTAMALRNKSFGSAQEFAWAHDSSEYAIRESNSIVKIFKNFKEKKSFKPDFGAESIYGGFLLGVRSVNGLAFYDWDNTELIRRIEIQPKHIFWSDSGELVCIATEESFFILKYLSEKVLAAQETHEGVTEDGIEDAFEVLGEIQEIVKTGLWVGDCFIYTSSVNRLNYYVGGEIVTIAHLDRTMYLLGYIPKDNRLYLGDKELNIISYSLLVSVLEYQTAVMRRDFSMADKVLPTIPKEQRTRVAHFLEKQGFKQQALTVSTDPEHRFELALQLGELKIAYQLAVEAESEQKWKQLAELAISKCQFGLAQECLHHAQDYGGLLLLATASGNANMVNKLAEGAERDGKNNVAFMSYFLQGKVDACLELLIRTGRLPEAAFLARTYLPSQVSRVVKLWRENLSKVNQKAAESLADPTEYENLFPGLKEAFVVEEWVKETHADLWPAKQYPLVTPNEERNVMEEGKDFQPSRSTAQQELDGKPASPTPVIVASHTANKEEKSLLELEVDLDNLELEDIDTTDINLDEDILDD

SEQ ID NO: 100 - protein, 906 aa, Homo sapiens
MPLRLDIKRKLTARSDRVKSVDLHPTEPWMLASLYNGSVCVWNHETQTLVKTFEVCDLPVRAAKFVARKNWVVTGADDMQIRVFNYNTLERVHMFEAHSDYIRCIAVHPTQPFILTSSDDMLIKLWDWDKKWSCSQVFEGHTHYVMQIVINPKDNNQFASASLDRTIKVWQLGSSSPNFTLEGHEKGVNCIDYYSGGDKPYLISGADDRLVKIWDYQNKTCVQTLEGHAQNVSCASFHPELPIIITGSEDGTVRIWHSSTYRLESTLNYGMERVWCVASLRGSNNVALGYDEGSIIVKLGREEPAMSMDANGKIIWAKHSEVQQANLKAMGDAEIKDGERLPLAVKDMGSCEIYPQTIQHNPNGRFVVVCGDGEYIIYTAMALRNKSFGSAQEFAWAHDSSEYAIRESNSIVKIFKNFKEKKSFKPDFGAESIYGGFLLGVRSVNGLAFYDWDNTELIRRIEIQPKHIFWSDSGELVCIATEESFFILKYLSEKVLAAQETHEGVTEDGIEDAFEVLGEIQEIVKTGLWVGDCFIYTSSVNRLNYYVGGEIVTIAHLDRTMYLLGYIPKDNRLYLGDKELNIISYSLLVSVLEYQTAVMRRDFSMADKVLPTIPKEQRTRVAHFLEKQGFKQQALTVSTDPEHRFELALQLGELKIAYQLAVEAESEQKWKQLAELAISKCQFGLAQECLHHAQDYGGLLLLATASGNANMVNKLAEGAERDGKNNVAFMSYFLQGKVDACLELLIRTGRLPEAAFLARTYLPSQVSRVVKLWRENLSKVNQKAAESLADPTEYENLFPGLKEAFVVEEWVKETHADLWPAKQYPLVTPNEERNVMEEGKDFQPSRSTAQQELDGKPASPTPVIVASHTANKEEKSLLELEVDLDNLELEDIDTTDINLDEDILDD

SEQ ID NO: 101 - protein, 212 aa, Homo sapiens
MNIFRLTGDLSHLAAIVILLLKIWKTRSCAGISGKSQLLFALVFTTRYLDLFTSFISLYNTSMKVIYLACSYATVYLIYLKFKATYDGNHDTFRVEFLVVPVGGLSFLVNHDFSPLEILWTFSIYLESVAILPQLFMISKTGEAETITTHYLFFLGLYRALYLVNWIWRFYFEGFFDLIAVVAGVVQTILYCDFFYLYITKVLKGKKLSLPA

SEQ ID NO: 102 - protein, 212 aa, Homo sapiens
MNLFRFLGDLSHLLAIILLLLKIWKSRSCAGISGKSQVLFAVVFTARYLDLFTNYISLYNTCMKVVYIACSFTTVWLIYSKFKATYDGNHDTFRVEFLVVPTAILAFLVNHDFTPLEILWTFSIYLESVAILPQLFMVSKTGEAETITSHYLFALGVYRTLYLFNWIWRYHFEGFFDLIAIVAGLVQTVLYCDFFYLYITKVLKGKKLSLPA

SEQ ID NO: 103 - protein, 317 aa, Homo sapiens
MNLFRFLGDLSHLLAIILLLLKIWKSRSCAGISGKSQVLFAVVFTARYLDLFTNYISLYNTCMKVVYIACSFTTVWLIYSKFKATYDGNHDTFRVEFLVVPTAILAFLVNHDFTPLEEDRPGWPDVLIFSTEAIIQEFSDPLDLLHLPGVSGHLAAAVHGEQDRRGGDHHQPLLVCARRLPHALSLQLDLALPFRGLLRPHRHCGRPGPDSPLLRFLLPLYHQSPKGEEVEFAGIAPVLSISLLGSSGRQRKAAEDEELSHPGVTFLRTHLLCSPSRLLPGFRGTVEDPGLGELRTWAVCSFLPFRQEKKIFPLFSF

SEQ ID NO: 104 - protein, 315 aa, Homo sapiens
MNLFRFLGDLSHLLAIILLLLKIWKSRSCAGISGKSQVLFAVVFTARYLDLFTNYISLYNTCMKVVYIACSFTTVWLIYSKFKATYDGNHDTFRVEFLVVPTAILAFLVNHDFTPLEHQLTWLHESLPGGFWMILGADPLDLLHLPGVSGHLAAAVHGEQDRRGGDHHQPLLVCARRLPHALSLQLDLALPFRGLLRPHRHCGRPGPDSPLLRFLLPLYHQSPKGEEVEFAGIAPVLSISLLGSSGRQRKAAEDEELSHPGVTFLRTHLLCSPSRLLPGFRGTVEDPGLGELRTWAVCSFLPFRQEKKIFPLFSF

SEQ ID NO: 105 - protein, 153 aa, Homo sapiens [sequence omitted]

SEQ ID NO: 106 - protein, 478 aa, Homo sapiens
MGRCCFYTAGTLSLLLLVTSVTLLVARVFQKAVDQSIEKKIVLRNGTEAFDSWEKPPLPVYTQFYFFNVTNPEEILRGETPRVEEVGPYTYRELRNKANIQFGDNGTTISAVSNKAYVFERDQSVGDPKIDLIRTLNIPVLTVIEWSQVHFLREIIEAMLKAYQQKLFVTHTVDELLWGYKDEILSLIHVFRPDISPYFGLFYEKNGTNDGDYVFLTGEDSYLNFTKIVEWNGKTSLDWWITDKCNMINGTDGDSFHPLITKDEVLYVFPSDFCRSVYITFSDYESVQGLPAFRYKVPAEILANTSDNAGFCIPEGNCLGSGVLNVSICKNGAPIIMSFPHFYQADERFVSAIEGMHPNQEDHETFVDINPLTGIILKAAKRFQINIYVKKLDDFVETGDIRTMVFPVMYLNESVHIDKETASRLKSMINTTLIITNIPYIIMALGVFFGLVFTWLACKGQGSMDEGTADERAPLIRT

SEQ ID NO: 107 - protein, 745 aa, Homo sapiens
MEVMNLMEQPIKVTEWQQTYTYDSGIHSGANTCVPSVSSKGIMEEDEACGRQYTLKKTTTYTQGVPPSQGDLEYQMSTTARAKRVREAMCPGVSGEDSSLLLATQVEGQATNLQRLAEPSQLLKSAIVHLINYQDDAELATRALPELTKLLNDEDPVVVTKAAMIVNQLSKKEASRRALMGSPQLVAAVVRTMQNTSDLDTARCTTSILHNLSHHREGLLAIFKSGGIPALVRMLSSPVESVLFYAITTLHNLLLYQEGAKMAVRLADGLQKMVPLLNKNNPKFLAITTDCLQLLAYGNQESKLIILANGGPQALVQIMRNYSYEKLLWTTSRVLKVLSVCPSNKPAIVEAGGMQALGKHLTSNSPRLVQNCLWTLRNLSDVATKQEGLESVLKILVNQLSVDDVNVLTCATGTLSNLTCNNSKNKTLVTQNSGVEALIHAILRAGDKDDITEPAVCALRHLTSRHPEAEMAQNSVRLNYGIPAIVKLLNQPNQWPLVKATIGLIRNLALCPANHAPLQEAAVIPRLVQLLVKAHQDAQRHVAAGTQQPYTDGVRMEEIVEGCTGALHILARDPMNRMEIFRLNTIPLFVQLLYSSVENIQRVAAGVLCELAQDKEAADAIDAEGASAPLMELLHSRNEGTATYAAAVLFRISEDKNPDYRKRVSVELTNSLFKHDPAAWEAAQSMIPINEPYGDDLDATYRPMYSSDVPLDPLEMHMDMDGDYPIDTYSDGLRPPYPTADHMLA

SEQ ID NO: 108 - protein, 744 aa, Homo sapiens
MEVMNLMEQPIKVTEWQQTYTYDSGIHSGANTCVPSVSSKGIMEEDEACGRQYTLKKTTTYTQGVPPSQGDLEYQMSTTARAKRVREAMCPGVSGEGQLALLATQVEGQATNLQRLAEPSQLLKSAIVHLINYQDDAELVTRALPELTKLLNDEDPVVVTKAAMIVNQLSKKEASRRALMGSPQLVAAVVRTMQNTSDLDTARCTTSILHNLSHHREGLLAIFKSGGIPALVRMLSSPVESVLFYAITTLHNLLLYQEGAKMACAGRRAQKMVPLLNKNNPKFLAITTDCLQLLAYGNQESKLIILANGGPQALVQIMRNYSYEKLLWTTSRVLKVLSVCPSNKPAIVEAGGMQALGKHLTSNSPRLVQNCLWTLRNLSDVATKQEGLESVLKILVNQLSVDDVNVLTCATGTLSNLTCNNSKNKTLVTQNSGVEALIHAILRAGDKDDITEPAVCALRHLTSRHPEAEMAQNSVRLNYGIPAIVKLLNQPNQWPLVKATIGLIRNLALCPANHAPLQEAAVIPRLVQLLVKAHQDAQRHVAAGTQQPYTDGVRMEEIVEGCTGALHILARDPMNRMEIFRLNTIPLFVQLLYSSVENIQRVAAGVLCELAQDKEAADAIDAEGASAPLMELLHSRNEGTATYAAAVLFRISEDKNPDYRKRVSVELTNSLFKHDPAAWEAAQSMIPINEPYGDDMDATYRPMYSSDVPLDPLEMHMDMDGDYPIDTYSDGLRPPYPTADHMLA

SEQ ID NO: 109 - protein, 303 aa, Homo sapiens
MPVTVTRTTITTTTTSSSGLGSPMIVGSPRALTQPLGLLRLLQLVSTCVAFSLVASVGAWTGSMGNWSMFTWCFCFSVTLIILIVELCGLQARFPLSWRNYPTTYVQFLSHGRSRDHAIAATFFSCIACVAYATEVAWTRARPGEITGYMATVPGLLKVLETFVACIIFAFISDPNLYQHQPALEWCVAVYAICFILAAIAILLNLGECTNVLPIPFPSFLSGLALLSVLLYATALVLWPLYQFDEKYGGQPRRSRDVSCSRSHAYYVCAWDRRLAVAILTAINLLAYVADLVHSAHLVFVKV

SEQ ID NO: 110 - protein, 322 aa, Homo sapiens
MPVTVTRTTITTTTTSSSGLGSPMIVGSPRALTQPLGLLRLLQLVSTCVAFSLVASVGAWTGSMGNWSMFTWCFCFSVTLIILIVELCGLQARFPLSWRNFPITFACYAALFCLSASIIYPTTYVQFLSHGRSRDHAIAATFFSCIACVAYATEVAWTRARPGEITGYMATVPGLLKVLETFVACIIFAFISDPNLYQHQPALEWCVAVYAICFILAAIAILLNLGECTNVLPIPFPSFLSGLALLSVLLYATALVLWPLYQFDEKYGGQPRRSRDVSCSRSHAYYVCAWDRRLAVAILTAINLLAYVADLVHSAHLVFVKV

SEQ ID NO: 111 - protein, 657 aa, Homo sapiens
MRLKIGFILRSLLVVGSFLGLVVLWSSLTPRPDDPSPLSRMREDRDVNDPMPNRGGNGLAPGEDRFKPVVPWPHVEGVEVDLESIRRINKAKNEQEHHAGGDSQKDIMQRQYLTFKPQTFTYHDPVLRPGILGNFEPKEPEPPGVVGGPGEKAKPLVLGPEFKQAIQASIKEFGFNMVASDMISLDRSVNDLRQEECKYWHYDENLLTSSVVIVFHNEGWSTLMRTVHSVIKRTPRKYLAEIVLIDDFSNKEHLKEKLDEYIKLWNGLVKVFRNERREGLIQARSIGAQKAKLGQVLIYLDAHCEVAVNWYAPLVAPISKDRTICTVPLIDVINGNTYEIIPQGGGDEDGYARGAWDWSMLWKRVPLTPQEKRLRKTKTEPYRSPAMAGGLFAIEREFFFELGLYDPGLQIWGGENFEISYKIWQCGGKLLFVPCSRVGHIYRLEGWQGNPPPIYVGSSPTLKNYVRVVEVWWDEYKDYFYASRPESQALPYGDISELKKFREDHNCKSFKWFMEEIAYDITSHYPLPPKNVDWGEIRGFETAYCIDSMGKTNGGFVELGPCHRMGGNQLFRINEANQLMQYDQCLTKGADGSKVMITHCNLNEFKEWQYFKNLHRFTHIPSGKCLDRSEVLHQVFISNCDSSKTTQKWEMNNIHSV

SEQ ID NO: 112 - protein, 508 aa, Homo sapiens
MLRRALLCLAVAALVRADAPEEEDHVLVLRKSNFAEALAAHKYLLVEFYAPWCGHCKALAPEYAKAAGKLKAEGSEIRLAKVDATEESDLAQQYGVRGYPTIKFFRNGDTASPKEYTAGREADDIVNWLKKRTGPAATTLPDGAAAESLVESSEVAVIGFFKDVESDSAKQFLQAAEAIDDIPFGITSNSDVFSKYQLDKDGVVLFKKFDEGRNNFEGEVTKENLLDFIKHNQLPLVIEFTEQTAPKIFGGEIKTHILLFLPKSVSDYDGKLSNFKTAAESFKGKILFIFIDSDHTDNQRILEFFGLKKEECPAVRLITLEEEMTKYKPESEELTAERITEFCHRFLEGKIKPHLMSQELPEDWDKQPVKVLVGKNFEDVAFDEKKNVFVEFYAPWCGHCKQLAPIWDKLGETYKDHENIVIAKMDSTANEVEAVKVHSFPTLKFFPASADRTVIDYNGERTLDGFKKFLESGGQDGAGDDDDLEDLEEAEEPDMEEDDDQKAVKDEL

SEQ ID NO: 113 - protein, 185 aa, Homo sapiens
MTKYKPESEELTAERITEFCHRFLEGKIKPHLMSQELPEDWDKQPVKVLVGKNFEDVAFDEKKNVFVEFYAPWCGHCKQLAPIWDKLGETYKDHENIVIAKMDSTANEVEAVKVHSFPTLKFFPASADRTVIDYNGERTLDGFKKFLESGGQDGAGDDDDLEDLEEAEEPDMEEDDDQKAVKDEL

SEQ ID NO: 114 - protein, 357 aa, Homo sapiens
METRLPPRNIQDVESDSAKQFLQAAEAIDDIPFGITSNSDVFSKYQLDKDGVVLFKKFDEGRNNFEGEVTKENLLDFIKHNQLPLVIEFTEQTAPKIFGGEIKTHILLFLPKSVSDYDGKLSNFKTAAESFKGKILFIFIDSDHTDNQRILEFFGLKKEECPAVRLITLEEEMTKYKPESEELTAERITEFCHRFLEGKIKPHLMSQELPEDWDKQPVKVLVGKNFEDVAFDEKKNVFVEFYAPWCGHCKQLAPIWDKLGETYKDHENIVIAKMDSTANEVEAVKVHSFPTLKFFPASADRTVIDYNGERTLDGFKKFLESGGQDGAGDDDDLEDLEEAEEPDMEEDDDQKAVKDEL

SEQ ID NO: 115 - protein, 280 aa, Homo sapiens
MAPSGSLAVPLAVLVLLLWGAPWTHGRRSNVRVITDENWRELLEGDWMIEFYAPWCPACQNLQPEWESFAEWGEDLEVNIAKVDVTEQPGLSGRFIITALPTIYHCKDGEFRRYQGPRTKKDFINFISDKEWKSIEPVSSWFGPGSVLMSSMSALFQLSMWIRTCHNYFIEDLGLPVWGSYTVFALATLFSGLLLGLCMIFVADCLCPSKRRRPQPYPYPSKKLLSESAQPLKKVEEEQEADEEDVSEEEAESKEGTNKDFPQNAIRQRSLGPSLATDKS

SEQ ID NO: 116 - protein, 2871 aa, Homo sapiens
MSCNGGSHPRINTLGRMIRAESGPDLRYEVTSGGGGTSRMYYSRRGVITDQNSDGYCQTGTMSRHQNQNTIQELLQNCSDCLMRAELIVQPELKYGDGIQLTRSRELDECFAQANDQMEILDSLIREMRQMGQPCDAYQKRLLQLQEQMRALYKAISVPRVRRASSKGGGGYTCQSGSGWDEFTKHVTSECLGWMRQQRAEMDMVAWGVDLASVEQHINSHRGIHNSIGDYRWQLDKIKADLREKSAIYQLEEEYENLLKASFERMDHLRQLQNIIQATSREIMWINDCEEEELLYDWSDKNTNIAQKQEAFSIRMSQLEVKEKELNKLKQESDQLVLNQHPASDKIEAYMDTLQTQWSWILQITKCIDVHLKENAAYFQFFEEAQSTEAYLKGLQDSIRKKYPCDKNMPLQHLLEQIKELEKEREKILEYKRQVQNLVNKSKKIVQLKPRNPDYRSNKPIILRALCDYKQDQKIVHKGDECILKDNNERSKWYVTGPGGVDMLVPSVGLIIPPPNPLAVDLSCKIEQYYEAILALWNQLYINMKSLVSWHYCMIDIEKIRAMTIAKLKTMRQEDYMKTIADLELHYQEFIRNSQGSEMFGDDDKRKIQSQFTDAQKHYQTLVIQLPGYPQHQTVTTTEITHHGTCQDVNHNKVIETNRENDKQETWMLMELQKIRRQIEHCEGRMTLKNLPLADQGSSHHITVKINELKSVQNDSQAIAEVLNQLKDMLANFRGSEKYCYLQNEVFGLFQKLENINGVTDGYLNSLCTVRALLQAILQTEDMLKVYEARLTEEETVCLDLDKVEAYRCGLKKIKNDLNLKKSLLATMKTELQKAQQIHSQTSQQYPLYDLDLGKFGEKVTQLTDRWQRIDKQIDFRLWDLEKQIKQLRNYRDNYQAFCKWLYDAKRRQDSLESMKFGDSNTVMRFLNEQKNLHSEISGKRDKSEEVQKIAELCANSIKDYELQLASYTSGLETLLNIPIKRTMIQSPSGVILQEAADVHARYIELLTRSGDYYRFLSEMLKSLEDLKLKNTKIEVLEEELRLARDANSENCNKNKFLDQNLQKYQAECSQFKAKLASLEELKRQAELDGKSAKQNLDKCYGQIKELNEKITRLTYEIEDEKRRRKSVEDRFDQQKNDYDQLQKARQCEKENLGWQKLESEKAIKEKEYEIERLRVLLQEEGTRKREYENELAKVRNHYNEEMSNLRNKYETEINITKTTIKEISMQKEDDSKNLRNQLDRLSRENRDLKDEIVRLNDSILQATEQRRRAEENALQQKACGSEIMQKKQHLEIELKQVMQQRSEDNARHKQSLEEAAKTIQDKNKEIERLKAEFQEEAKRRWEYENELSKVRNNYDEEIISLKNQFETEINITKTTIHQLTMQKEEDTSGYRAQIDNLTRENRSLSEEIKRLKNTLTQTTENLRRVEEDIQQQKATGSEVSQRKQQLEVELRQVTQMRTEESVRYKQSLDDAAKTIQDKNKEIERLKQLIDKETNDRKCLEDENARLQRVQYDLQKANSSATETINKLKVQEQELTRLRIDYERVSQERTVKDQDITRFQNSLKELQLQKQKVEEELNRLKRTASEDSCKRKKLEEELEGMRRSLKEQAIKITNLTQQLEQASIVKKRSEDDLRQQRDVLDGHLREKQRTQEELRRLSSEVEALRRQLLQEQESVKQAHLRNEHFQKAIEDKSRSLNESKIEIERLQSLTENLTKEHLMLEEELRNLRLEYDDLRRGRSEADSDKNATILELRSQLQISNNRTLELQGLINDLQRERENLRQEIEKFQKQALEASNRIQESKNQCTQVVQERESLLVKIKVLEQDKARLQRLEDELNRAKSTLEAETRVKQRLECEKQQIQNDLNQWKTQYSRKEEAIRKIESEREKSEREKNSLRSEIERLQAEIKRIEERCRRKLEDSTRETQSQLETERSRYQREIDKLRQRPYGSHRETQTECEWTVDTSKLVFDGLRKKVTAMQLYECQLIDKTTLDKLLKGKKSVEEVASEIQPFLRGAGSIAGASASPKEKYSLVEAKRKKLISPESTVMLLEAQAATGGIIDPHRNEKLTVDSAIARDLIDFDDRQQIYAAEKAITGFDDPFSGKTVSVSEAIKKNLIDRETGMRLLEAQIASGGVVDPVNSVFLPKDVALARGLIDRDLYRSLNDPRDSQKNFVDPVTKKKVSYVQLKERCRIEPHTGLLLLSVQKRSMSFQGIRQPVTVTELVDSGILRPSTVNELESGQISYDEVGERIKDFLQGSSCIAGIYNETTKQKLGIYEAMKIGLVRPGTALELLEAQAATGFIVDPVSNLRLPVEEAYKRGLVGIEFKEKLLSAERAVTGYNDPETGNIISLFQAMNKELIEKGHGIRLLEAQIATGGIIDPKESHRLPVDIAYKRGYFNEELSEILSDPSDDTKGFFDPNTEENLTYLQLKERCIKDEETGLCLLPLKEKKKQVQTSQKNTLRKRRVVIVDPETNKEMSVQEAYKKGLIDYETFKELCEQECEWEEITITGSDGSTRVVLVDRKTGSQYDIQDAIDKGLVDRKFFDQYRSGSLSLTQFADMISLKNGVGTSSSMGSGVSDDVFSSSRHESVSKISTISSVRNLTIRSSSFSDTLEESSPIAAIFDTENLEKISITEGIERGIVDSITGQRLLEAQACTGGIIHPTTGQKLSLQDAVSQGVIDQDMATRLKPAQKAFIGFEGVKGKKKMSAAEAVKEKWLPYEAGQRFLEFQYLTGGLVDPEVHGRISTEEAIRKGFIDGRAAQRLQDTSSYAKILTCPKTKLKISYKDAINRSMVEDITGLRLLEAASVSSKGLPSPYNMSSAPGSRSGSRSGSRSGSRSGSRSGSRRGSFDATGNSSYSYSYSFSSSSIGH

SEQ ID NO: 117 - protein, 2871 aa, Homo sapiens
MSCNGGSHPRINTLGRMIRAESGPDLRYEVTSGGGGTSRMYYSRRGVITDQNSDGYCQTGTMSRHQNQNTIQELLQNCSDCLMRAELIVQPELKYGDGIQLTRSRELDECFAQANDQMEILDSLIREMRQMGQPCDAYQKRLLQLQEQMRALYKAISVPRVRRASSKGGGGYTCQSGSGWDEFTKHVTSECLGWMRQQRAEMDMVAWGVDLASVEQHINSHRGIHNSIGDYRWQLDKIKADLREKSAIYQLEEEYENLLKASFERMDHLRQLQNIIQATSREIMWINDCEEEELLYDWSDKNTNIAQKQEAFSIRMSQLEVKEKELNKLKQESDQLVLNQHPASDKIEAYMDTLQTQWSWILQITKCIDVHLKENAAYFQFFEEAQSTEAYLKGLQDSIRKKYPCDKNMPLQHLLEQIKELEKEREKILEYKRQVQNLVNKSKKIVQLKPRNPDYRSNKPIILRALCDYKQDQKIVHKGDECILKDNNERSKWYVTGPGGVDMLVPSVGLIIPPPNPLAVDLSCKIEQYYEAILALWNQLYINMKSLVSWHYCMIDIEKIRAMTIAKLKTMRQEDYMKTIADLELHYQEFIRNSQGSEMFGDDDKRKIQSQFTDAQKHYQTLVIQLPGYPQHQTVTTTEITHHGTCQDVNHNKVIETNRENDKQETWMLMELQKIRRQIEHCEGRMTLKNLPLADQGSSHHITVKINELKSVQNDSQAIAEVLNQLKDMLANFRGSEKYCYLQNEVFGLFQKLENINGVTDGYLNSLCTVRALLQAILQTEDMLKVYEARLTEEETVCLDLDKVEAYRCGLKKIKNDLNLKKSLLATMKTELQKAQQIHSQTSQQYPLYDLDLGKFGEKVTQLTDRWQRIDKQIDFRLWDLEKQIKQLRNYRDNYQAFCKWLYDRKRRQDSLESMKFGDSNTVMRFLNEQKNLHSEISGKRDKSEEVQKIAELCANSIKDYELQLASYTSGLETLLNIPIKRTMIQSPSGVILQEAADVHARYIELLTRSGDYYRFLSEMLKSLEDLKLKNTKIEVLEEELRLARDANSENCNKNKFLDQNLQKYQAECSQFKAKLASLEELKRQAELDGKSAKQNLDKCYGQIKELNEKITRLTYEIEDEKRRRKSVEDRFDQQKNDYDQLQKARQCEKENLGWQKLESEKAIKEKEYEIERLRVLLQEEGTRKREYENELAKVRNHYNEEMSNLRNKYETEINITKTTIKEISMQKEDDSKNLRNQLDRLSRENRDLKDEIVRLNDSILQATEQRRRAEENALQQKACGSEIMQKKQHLEIELKQVMQQRSEDNARHKQSLEEAAKTIQDKNKEIERLKAEFQEEAKRRWEYENELSKVRNNYDEEIISLKNQFETEINITKTTIHQLTMQKEEDTSGYRAQIDNLTRENRSLSEEIKRLKNTLTQTTENLRRVEEDIQQQKATGSEVSQRKQQLEVELRQVTQMRTEESVRYKQSLDDAAKTIQDKNKEIERLKQLIDKETNDRKCLEDENARLQRVQYDLQKANSSATETINKLKVQEQELTRLRIDYERVSQERTVKDQDITRFQNSLKELQLQKQKVEEELNRLKRTASEDSCKRKKLEEELEGMRRSLKEQAIKITNLTQQLEQASIVKKRSEDDLRQQRDVLDGHLREKQRTQEELRRLSSEVEALRRQLLQEQESVKQAHLRNEHFQKAIEDKSRSLNESKIEIERLQSLTENLTKEHLMLEEELRNLRLEYDDLRRGRSEADSDKNATILELRSQLQISNNRTLELQGLINDLQRERENLRQEIEKFQKQALEASNRIQESKNQCTQVVQERESLLVKIKVLEQDKARLQRLEDELNRAKSTLEAETRVKQRLECEKQQIQNDLNQWKTQYSRKEEAIRKIESEREKSEREKNSLRSEIERLQAEIKRIEERCRRKLEDSTRETQSQLETERSRYQREIDKLRQRPYGSHRETQTECEWTVDTSKLVFDGLRKKVTAMQLYECQLIDKTTLDKLLKGKKSVEEVASEIQPFLRGAGSIAGASASPKEKYSLVEAKRKKLISPESTVMLLEAQAATGGIIDPHRNEKLTVDSAIARDLIDFDDRQQIYAAEKAITGFDDPFSGKTVSVSEAIKKNLIDRETGMRLLEAQIASGGVVDPVNSVFLPKDVALARGLIDRDLYRSLNDPRDSQKNFVDPVTKKKVSYVQLKERCRIEPHTGLLLLSVQKRSMSFQGIRQPVTVTELVDSGILRPSTVNELESGQISYDEVGERIKDFLQGSSCIAGIYNETTKQKLGIYEAMKIGLVRPGTALELLEAQAATGFIVDPVSNLRLPVEEAYKRGLVGIEFKEKLLSAERAVTGYNDPETGNIISLFQAMNKELIEKGHGIRLLEAQIATGGIIDPKESHRLPVDIAYKRGYFNEELSEILSDPSDDTKGFFDPNTEENLTYLQLKERCIKDEETGLCLLPLKEKKKQVQTSQKNTLRKRRVVIVDPETNKEMSVQEAYKKGLIDYETFKELCEQECEWEEITITGSDGSTRVVLVDRKTGSQYDIQDAIDKGLVDRKFFDQYRSGSLSLTQFADMISLKNGVGTSSSMGSGVSDDVFSSSRHESVSKISTISSVRNLTIRSSSFSDTLEESSPIAAIFDTENLEKISITEGIERGIVDSITGQRLLEAQACTGGIIHPTTGQKLSLQDAVSQGVIDQDMATSVKPAQKAFIGFEGVKGKKKMSAAEAVKEKWLPYEAGQRFLEFQYLTGGLVDPEVHGRISTEEAIRKGFIDGRAAQRLQDTSSYAKILTCPKTKLKISYKDAINRSMVEDITGLRLLEAASVSSKGLPSPYNMSSAPGSRSGSRSGSRSGSRSGSRSGSRRGSFDATGNSSYSYSYSFSSSSIGH

SEQ ID NO: 118 - protein, 1307 aa, Homo sapiens [sequence omitted]

SEQ ID NO: 119 - protein, 1394 aa, Homo sapiens
MAALLRSARWLLRAGAAPRLPLSLRLLPGGPGRLHAASYLPAARAGPVAGGLLSPARLYAIAAKEKDIQEESTFSSRKISNQFDWALMRLDLSVRRTGRIPKKLLQKVFNDTCRSGGLGGSHALLLLRSCGSLLPELKLEERTEFAHRIWDTLQKLGAVYDVSHYNALLKVYLQNEYKFSPTDFLAKMEEANIQPNRVTYQRLIASYCNVGDIEGASKILGFMKTKDLPVTEAVFSALVTGHARAGDMENAENILTVMRDAGIEPGPDTYLALLNAYAEKGDIDHVKQTLEKVEKSELHLMDRDLLQIIFSFSKAGYPQYVSEILEKVTCERRYIPDAMNLILLLVTEKLEDVALQILLACPVSKEDGPSVFGSFFLQHCVTMNTPVEKLTDYCKKLKEVQMHSFPLQFTLHCALLANKTDLAKALMKAVKEEGFPIRPHYFWPLLVGRRKEKNVQGIIEILKGMQELGVHPDQETYTDYVIPCFDSVNSARAILQENGCLSDSDMFSQAGLRSEAANGNLDFVLSFLKSNTLPISLQSIRSSLLLGFRRSMNINLWSEITELLYKDGRYCQEPRGPTEAVGYFLYNLIDSMSDSEVQAKEEHLRQYFHQLEKMNVKIPENIYRGIRNLLESYHVPELIKDAHLLVESKNLDFQKTVQLTSSELESTLETLKAENQPIRDVLKQLILVLCSEENMQKALELKAKYESDMVTGGYAALINLCCRHDKVEDALNLKEEFDRLDSSAVLDTGKYVGLVRVLAKHGKLQDAINILKEMKEKDVLIKDTTALSFFHMLNGAALRGEIETVKQLHEAIVTLGLAEPSTNISFPLVTVHLEKGDLSTALEVAIDCYEKYKVLPRIHDVLCKLVEKGETDLIQKAMDFVSQEQGEMVMLYDLFFAFLQTGNYKEAKKIIETPGIRARSARLQWFCDRCVANNQVETLEKLVELTQKLFECDRDQMYYNLLKLYKINGDWQRADAVWNKIQEENVIPREKTLRLLAEILREGNQEVPFDVPELWYEDEKHSLNSSSASTTEPDFQKDILIACRLNQKKGAYDIFLNAKEQNIVFNAETYSNLIKLLMSEDYFTQAMEVKAFAETHIKGFTLNDAANSRLIITQVRRDYLKEAVTTLKTVLDQQQTPSRLAVTRVIQALAMKGDVENIEVVQKMLNGLEDSIGLSKMVFINNIALAQIKNNNIDAAIENIENMLTSENKVIEPQYFGLAYLFRKVIEEQLEPAVEKISIMAERLANQFAIYKPVTDFFLQLVDAGKVDDARALLQRCGAIAEQTPILLLFLLRNSRKQGKASTVKSVLELIPELNEKEEAYNSLMKSYVSEKDVTSAKALYEHLTAKNTKLDDLFLKRYASLLKYAGEPVPFIEPPESFEFYAQQLRKLRENSS

SEQ ID NO: 120 - protein, 241 aa, Homo sapiens
MQCFSFIKTMMILFNLLIFLCGAALLAVGIWVSIDGASFLKIFGPLSSSAMQFVNVGYFLIAAGVVVFALGFLGCYGAKTESKCALVTFFFILLLIFIAEVAAAVVALVYTTMAEHFLTLLVVPAIKKDYGSQEDFTQVWNTTMKGLKCCGFTNYTDFEDSPYFKENSAFPPFCCNDNVTNTANETCTKQKAHDQKVEGCFNQLLYDIRTNAVTVGGVAAGIGGLELAAMIVSMYLYCNLQ

SEQ ID NO: 121 - protein, 193 aa, Homo sapiens
MTVARPSVPAALPLLGELPRLLLLVLLCLPAVWGDCGLPPDVPNAQPALEGRTSFPEDTVITYKCEESFVKIPGEKDSVICLKGSQWSDIEEFCNRSCEVPTRLNSASLKQPYITQNYFPVGTVVEYECRPGYRREPSLSPKLTCLQNLKWSTAVEFCKKKSCPNPGEIRNGQIDVPGGILFGATISFSCNTG

SEQ ID NO: 122 - protein, 321 aa, Homo sapiens
GHLIVISFSSAFVSLGDCGLPPDVPNAQPALEGRTSFPEDTVITYKCEESFVKIPGEKDSVICLKGSQWSDIEEFCNRSCEVPTRLNSASLKQPYITQNYFPVGTVVEYECRPGYRREPSLSPKLTCLQNLKWSTAVEFCKKKSCPNPGEIRNGQIDVPGGILFGATISFSCNTGYKLFGSTSSFCLISGSSVQWSDPLPECREIYCPAPPQIDNGIIQGERDHYGYRQSVTYACNKGFTMIGEHSIYCTVNNDEGEWSGPPPECRATRSTPVSRTTKHFHETTPNKGSGTTSGTTRLLSGHTCFTLTGLLGTLVTMGLLT

SEQ ID NO: 123 - protein, 440 aa, Homo sapiens
MTVARPSVPAALPLLGELPRLLLLVLLCLPAVWGDCGLPPDVPNAQPALEGRTSFPEDTVITYKCEESFVKIPGEKDSVICLKGSQWSDIEEFCNRSCEVPTRLNSASLKQPYITQNYFPVGTVVEYECRPGYRREPSLSPKLTCLQNLKWSTAVEFCKKKSCPNPGEIRNGQIDVPGGILFGATISFSCNTGYKLFGSTSSFCLISGSSVQWSDPLPECREIYCPAPPQIDNGIIQGERDHYGYRQSVTYACNKGFTMIGEHSIYCTVNNDEGEWSGPPPECRGKSLTSKVPPTVQKPTTVNVPTTEVSPTSQKTTTKTTTPNAQATRSTPVSRTTKHFHETTPNKGSGTTSGTTRLLSGSRPVTQAGMRWCDRSSLQSRTPGFKRSFHFSLPSSWYYRAHVFHVDRFAWDASNHGLADLAKEELRRKYTQVYRLFLVS

SEQ ID NO: 124 - protein, 376 aa, Homo sapiens
GHLIVISFSSAFVSLGDCGLPPDVPNAQPALEGRTSFPEDTVITYKCEESFVKIPGEKDSVICLKGSQWSDIEEFCNRSCEVPTRLNSASLKQPYITQNYFPVGTVVEYECRPGYRREPSLSPKLTCLQNLKWSTAVEFCKKKSCPNPGEIRNGQIDVPGGILFGATISFSCNTGYKLFGSTSSFCLISGSSVQWSDPLPECREIYCPAPPQIDNGIIQGERDHYGYRQSVTYACNKGFTMIGEHSIYCTVNNDEGEWSGPPPECRGKSLTSKVPPTVQKPTTVNVPTTEVSPTSQKTTTKTTTPNAQATRSTPVSRTTKHFHETTPNKGSGTTSGQLTLFRFTEYGSNVLWWKYELDQDCRIKWSLIYCSQGFSY

SEQ ID NO: 125 - protein, 363 aa, Homo sapiens
GHLIVISFSSAFVSLGDCGLPPDVPNAQPALEGRTSFPEDTVITYKCEESFVKIPGEKDSVICLKGSQWSDIEEFCNRSCEVPTRLNSASLKQPYITQNYFPVGTVVEYECRPGYRREPSLSPKLTCLQNLKWSTAVEFCKKKSCPNPGEIRNGQIDVPGGILFGATISFSCNTGYKLFGSTSSFCLISGSSVQWSDPLPECREIYCPAPPQIDNGIIQGERDHYGYRQSVTYACNKGFTMIGEHSIYCTVNNDEGEWSGPPPECRGKSLTSKVPPTVQKPTTVNVPTTEVSPTSQKTTTKTTTPNAQATRSTPVSRTTKHFHETTPNKGSGTTSGTTRLLSGHTCFTLTGLLGTLVTMGLLT

SEQ ID NO: 126 - protein, 381 aa, Homo sapiens
MTVARPSVPAALPLLGELPRLLLLVLLCLPAVWGDCGLPPDVPNAQPALEGRTSFPEDTVITYKCEESFVKIPGEKDSVICLKGSQWSDIEEFCNRSCEVPTRLNSASLKQPYITQNYFPVGTVVEYECRPGYRREPSLSPKLTCLQNLKWSTAVEFCKKKSCPNPGEIRNGQIDVPGGILFGATISFSCNTGYKLFGSTSSFCLISGSSVQWSDPLPECREIYCPAPPQIDNGIIQGERDHYGYRQSVTYACNKGFTMIGEHSIYCTVNNDEGEWSGPPPECRGKSLTSKVPPTVQKPTTVNVPTTEVSPTSQKTTTKTTTPNAQATRSTPVSRTTKHFHETTPNKGSGTTSGTTRLLSGHTCFTLTGLLGTLVTMGLLT

SEQ ID NO: 127 - protein, 381 aa, Homo sapiens
MTVARPSVPAALPLLGELPRLLLLVLLCLPAVWGDCGLPPDVPNAQPALEGRTSFPEDTVITYKCEESFVKIPGEKDSVTCLKGSQWSDIEEFCNRSCEVPTRLNSASLKQPYITQNYFPVGTVVEYECRPGYRREPSLSPKLTCLQNLKWSTAVEFCKKKSCPNPGEIRNGQIDVPGGILFGATISFSCNTGYKLFGSTSSFCLISGSSVQWSDPLPECREIYCPAPPQIDNGIIQGERDHYGYRQSVTYACNKGFTMIGEHSIYCTVNNDEGEWSGPPPECRGKSLTSKVPPTVQKPTTVNVPTTEVSPTSQKTTTKTTTPNAQATRSTPVSRTTKHFHETTPNKGSGTTSGTTRLLSGHTCFTLTGLLGTLVTMGLLT

SEQ ID NO: 128 - protein, 349 aa, Homo sapiens
MEPPGRRECPFPSWRFPGLLLAAMVLLLYSFSDACEEPPTFEAMELIGKPKPYYEIGERVDYKCKKGYFYIPPLATHTICDRNHTWLPVSDDACYRETCPYIRDPLNGQAVPANGTYEFGYQMHFICNEGYYLIGEEILYCELKGSVAIWSGKPPICEKVLCTPPPKIKNGKHTFSEVEVFEYLDAVTYSCDPAPGPDPFSLIGESTIYCGDNSVWSRAAPECKVVKCRFPVVENGKQISGFGKKFYYKATVMFECDKGFYLDGSDTIVCDSNSTWDPPVPKCLKGPRPTYKPPVSNYPGYPKPEEGILDSLDVWVIAVIVIAIGKQMVELNMPLTRLNQPLQQSREAE

SEQ ID NO: 129 - protein, 369 aa, Homo sapiens
MEPPGRRECPFPSWRFPGLLLAAMVLLLYSFSDACEEPPTFEAMELIGKPKPYYEIGERVDYKCKKGYFYIPPLATHTICDRNHTWLPVSDDACYRETCPYIRDPLNGQAVPANGTYEFGYQMHFICNEGYYLIGEEILYCELKGSVAIWSGKPPICEKVLCTPPPKIKNGKHTFSEVEVFEYLDAVTYSCDPAPGPDPFSLIGESTIYCGDNSVWSRAAPECKVVKCRFPVVENGKQISGFGKKFYYKATVMFECDKGFYLDGSDTIVCDSNSTWDPPVPKCLKGPRPTYKPPVSNYPGYPKPEEGILDSLDVWVIAVIVIAIVVGVAVICVVPYRYLQRRKKKGKADGGAEYATYQTKSTTPAEQRG

SEQ ID NO: 130 - protein, 384 aa, Homo sapiens
MEPPGRRECPFPSWRFPGLLLAAMVLLLYSFSDACEEPPTFEAMELIGKPKPYYEIGERVDYKCKKGYFYIPPLATHTICDRNHTWLPVSDDACYRETCPYIRDPLNGQAVPANGTYEFGYQMHFICNEGYYLIGEEILYCELKGSVAIWSGKPPICEKVLCTPPPKIKNGKHTFSEVEVFEYLDAVTYSCDPAPGPDPFSLIGESTIYCGDNSVWSRAAPECKVVKCRFPVVENGKQISGFGKKFYYKATVMFECDKGFYLDGSDTIVCDSNSTWDPPVPKCLKVSTSSTTKSPASSASGPRPTYKPPVSNYPGYPKPEEGILDSLDVWVIAVIVIAIVVGVAVICVVPYRYLQRRKKKGKADGGAEYATYQTKSTTPAEQRG

SEQ ID NO: 131 - protein, 377 aa, Homo sapiens
MEPPGRRECPFPSWRFPGLLLAAMVLLLYSFSDACEEPPTFEAMELIGKPKPYYEIGERVDYKCKKGYFYIPPLATHTICDRNHTWLPVSDDACYRETCPYIRDPLNGQAVPANGTYEFGYQMHFICNEGYYLIGEEILYCELKGSVAIWSGKPPICEKVLCTPPPKIKNGKHTFSEVEVFEYLDAVTYSCDPAPGPDPFSLIGESTIYCGDNSVWSRAAPECKVVKCRFPVVENGKQISGFGKKFYYKATVMFECDKGFYLDGSDTIVCDSNSTWDPPVPKCLKVSTSSTTKSPASSASGPRPTYKPPVSNYPGYPKPEEGILDSLDVWVIAVIVIAIVVGVAVICVVPYRYLQRRKKKGTYLTDETHREVKFTSL

SEQ ID NO: 132 - protein, 228 aa, Homo sapiens
MPVKGGTKCIKYLLFGFNFIFWLAGIAVLAIGLWLRFDSQTKSIFEQETNNNNSSFYTGVYILIGAGALMMLVGFLGCCGAVQESQCMLGLFFGFLLVIFAIEIAAAIWGYSHKDEVIKEVQEFYKDTYNKLKTKDEPQRETLKAIHYALNCCGLAGGVEQFISDICPKKDVLETFTVKSCPDAIKEVFDNKFHIIGAVGIGIAVVMIFGMIFSMILCCAIRRNREMV

SEQ ID NO: 133 - protein, 303 aa, Homo sapiens
MADAASQVLLGSGLTILSQPLMYVKVLIQVGYEPLPPTIGRNIFGRQVCQLPGLFSYAQHIASIDGRRGLFTGLTPRLCSGVLGTVVHGKVLQHYQESDKGEELGPGNVQKEVSSSFDHVIKETTREMIARSAATLITHPFHVITLRSMVQFIGRESKYCGLCDSIITIYREEGILGFFAGLVPRLLGDILSLWLCNSLAYLVNTYALDSGVSTMNEMKSYSQAVTGFFASMLTYPFVLVSNLMAVNNCGLAGGCPPYSPIYTSWIDCWCMLQKEGNMSRGNSLFFRKVPFGKTYCCDLKMLI

SEQ ID NO: 134 - protein, 237 aa, Homo sapiens
MAGVSACIKYSMFTFNFLFWLCGILILALAIWVRVSNDSQAIFGSEDVGSSSYVAVDILIAVGAIIMILGFLGCCGAIKESRCMLLLFFIGLLLILLLQVATGILGAVFKSKSDRIVNETLYENTKLLSATGESEKQFQEAIIVFQEEFKCCGLVNGAADWGNNFQHYPELCACLDKQRPCQSYNGKQVYKETCISFIKDFLAKNLIIVIGISFGLAVIEILGLVFSMVLYCQIGNK

SEQ ID NO: 135 - protein, 583 aa, Homo sapiens [sequence omitted]

SEQ ID NO: 136 - protein, 532 aa, Homo sapiens [sequence omitted]

SEQ ID NO: 137 - protein, 570 aa, Homo sapiens [sequence omitted]

SEQ ID NO: 138 - protein, 583 aa, Homo sapiens
MESKGASSCRLLFCLLISATVFRPGLGWYTVNSAYGDTIIIPCRLDVPQNLMFGKWKYEKPDGSPVFIAFRSSTKKSVQYDDVPEYKDRLNLSENYTLSISNARISDEKRFVCMLVTEDNVFEAPTIVKVFKQPSKPEIVSKALFLETEQLKKLGDCISEDSYPDGNITWYRNGKVLHPLEGAVVIIFKKEMDPVTQLYTMTSTLEYKTTKADIQMPFTCSVTYYGPSGQKTIHSEQAVFDIYYPTEQVTIQVLPPKNAIKEGDNITLKCLGNGNPPPEEFLFYLPGQPEGIRSSNTYTLMDVRRNATGDYKCSLIDKKSMIASTAITVHYLDLSLNPSGEVTRQIGDALPVSCTISASRNATVVWMKDNIRLRSSPSFSSLHYQDAGNYVCETALQEVEGLKKRESLTLIVEGKPQIKMTKKTDPSGLSKTIICHVEGFPKPAIQWTITGSGSVINQTEESPYINGRYYSKIIISPEENVTLTCTAENQLERTVNSLNVSAISIPEHDEADEISDENREKVNDQAKLIVGIVVGLLLAALVAGVVYWLYMKKSKTASKHVNKDLGNMEENKKLEENNHKTEA

SEQ ID NO: 139 - protein, 687 aa, Homo sapiens
MAEELVLERCDLELETNGRDHHTADLCREKLVVRRGQPFWLTLHFEGRNYEASVDSLTFSVVTGPAPSQEAGTKARFPLRDAVEEGDWTATVVDQQDCTLSLQLTTPANAPIGLYRLSLEASTGYQGSSFVLGHFILLFNAWCPADAVYLDSEEERQEYVLTQQGFIYQGSAKFIKNIPWNFGQFEDGILDICLILLDVNPKFLKNAGRDCSRRSSPVYVGRVVSGMVNCNDDQGVLLGRWDNNYGDGVSPMSWIGSVDILRRWKNHGCQRVKYGQCWVFAAVACTVLRCLGIPTRVVTNYNSAHDQNSNLLIEYFRNEFGEIQGDKSEMIWNFHCWVESWMTRPDLQPGYEGWQALDPTPQEKSEGTYCCGPVPVRAIKEGDLSTKYDAPFVFAEVNADVVDWIQQDDGSVHKSINRSLIVGLKISTKSVGRDEREDITHTYKYPEGSSEEREAFTRANHLNKLAEKEETGMAMRIRVGQSMNMGSDFDVFAHITNNTAEEYVCRLLLCARTVSYNGILGPECGTKYLLNLNLEPFSEKSVPLCILYEKYRDCLTESNLIKVRALLVEPVINSYLLAERDLYLENPEIKIRILGEPKQKRKLVAEVSLQNPLPVALEGCTFTVEGAGLTEEQKTVEIPDPVEAGEEVKVRMDLLPLHMGLHKLVVNFESDKLKAVKGFRNVIIGPA

SEQ ID NO: 140 - protein, 349 aa, Homo sapiens
MAEELVLERCDLELETNGRDHHTADLCREKLVVRRGQPFWLTLHFEGRNYEASVDSLTFSVVTGPAPSQEAGTKARFPLRDAVEEGDWTATVVDQQDCTLSLQLTTPANAPIGLYRLSLEASTGYQGSSFVLGHFILLFNAWCPADAVYLDSEEERQEYVLTQQGFIYQGSAKFIKNIPWNFGQFEDGILDICLILLDVNPKFLKNAGRDCSRRSSPVYVGRVVSGMVNCNDDQGVLLGRWDNNYGDGVSPMSWIGSVDILRRWKNHGCQRVKYGQCWVFAAVACTGELHAGMWVMSPGRGHEEHWSRNQDIPALVLPPATNTLNALCGLEPVTTLSGPLSNSHPSSGC

SEQ ID NO: 141 - protein, 548 aa, Homo sapiens
MAEELVLERCDLELETNGRDHHTADLCREKLVVRRGQPFWLTLHFEGRNYEASVDSLTFSVVTGPAPSQEAGTKARFPLRDAVEEGDWTATVVDQQDCTLSLQLTTPANAPIGLYRLSLEASTGYQGSSFVLGHFILLFNAWCPADAVYLDSEEERQEYVLTQQGFIYQGSAKFIKNIPWNFGQFEDGILDICLILLDVNPKFLKNAGRDCSRRSSPVYVGRVVSGMVNCNDDQGVLLGRWDNNYGDGVSPMSWIGSVDILRRWKNHGCQRVKYGQCWVFAAVACTVLRCLGIPTRVVTNYNSAHDQNSNLLIEYFRNEFGEIQGDKSEMIWNFHCWVESWMTRPDLQPGYEGWQALDPTPQEKSEGTYCCGPVPVRAIKEGDLSTKYDAPFVFAEVNADVVDWIQQDDGSVHKSINRSLIVGLKISTKSVGRDEREDITHTYKYPEGSSEEREAFTRANHLNKLAEKEETGMAMRIRVGQSMNMGSDFDVFAHITNNTAEEYVCRLLLCARTVSYNGILGPECGTKYLLNLNLEPFSGKALCSWSIC

SEQ ID NO: 142 - protein, 560 aa, Homo sapiens [sequence omitted]

SEQ ID NO: 143 - protein, 559 aa, Homo sapiens
MNDYGFIYQGSKNWIRPCPWNYGQFEDKIIDICLKLLDKSLHFQTDPATDCALRGSPVYVSRVVCAMINSNDDNGVLNGNWSENYTDGANPAEWTGSVAILKQWNATGCQPVRYGQCWVFAAVMCTVMRCLGIPTRVITNFDSGHDTDGNLIIDEYYDNTGRILGNKKKDTIWNFHVWNECWMARKDLPPAYGGWQVLDATPQEMSNGVYCCGPASVRAIKEGEVDLNYDTPFVFSMVNADCMSWLVQGGKEQKLHQDTSSVGNFISTKSIQSDERDDITENYKYEEGSLQERQVFLKALQKLKARSFHGSQRGAELQPSRPTSLSQDSPRSLHTPSLRPSDVVQVSLKFKLLDPPNMGQDICFVLLALNMSSQFKDLKVNLSAQSLLHDGSPLSPFWQDTAFITLSPKEAKTYPCKISYSQYSQYLSTDKLIRISALGEEKSSPEKILVNKIITLSYPSITINVLGAAVVNQPLSIQVIFSNPLSEQVEDCVLTVEGSGLFKKQQKVFLGVLKPQHQASIILETVPFKSGQRQIQANMRSNKFKDIKGYRNVYVDFAL

SEQ ID NO: 144 - protein, 430 aa, Homo sapiens
MALLHSGRVLPGIAAAFHPGLAAAASARASSWWTHVEMGPPDPILGVTEAFKRDTNSKKMNLGVGAYRDDNGKPYVLPSVRKAEAQIAAKNLDKEYLPIGGLAEFCKASAELALGENSEVLKSGRFVTVQTISGTGALRIGASFLQRFFKFSRDVFLPKPTWGNHTPIFRDAGMQLQGYRYYDPKTCGFDFTGAVEDISKIPEQSVLLLHACAHNPTGVDPRPEQWKEIATVVKKRNLFAFFDMAYQGFASGDGDKDAWAVRHFIEQGINVCLCQSYAKNMGLYGERVGAFTMVCKDADEAKRVESQLKILIRPMYSNPPLNGARIAAAILNTPDLRKQWLQEVKGMADRIIGMRTQLVSNLKKEGSTHNWQHITDQIGMFCFTGLKPEQVERLIKEFSIYMTKDGRISVAGVTSSNVGYLAHAIHQVTK

SEQ ID NO: 145 - protein, 1029 aa, Homo sapiens
MGLWGKKGTVAPHDQSPRRRPKKGLIKKKMVKREKQKRNMEELKKEVVMDDHKLTLEELSTKYSVDLTKGHSHQRAKEILTRDGPNTVTPPPTTPEWVKFCKQLFGGFSLLLWTGAILCFVAYSIQIYFNEEPTKDNLYLSIVLSVVVIVTGCFSYYQEAKSSKIMESFKNMVPQQALVIRGGEKMQINVQEVVLGDLVEIKGGDRVPADLRLISAQGCKVDNSSLTGESEPQSRSPDFTHENPLETRNICFFSTNCVEGTARGIVIATGDSTVMGRIASLTSGLAVGQTPIAAEIEHFIHLITVVAVFLGVTFFALSLLLGYGWLEAIIFLIGIIVANVPEGLLATVTVCLTLTAKRMARKNCLVKNLEAVETLGSTSTICSDKTGTLTQNRMTVAHMWFDMTVYEADTTEEQTGKTFTKSSDTWFMLARIAGLCNRADFKANQEILPIAKRATTGDASESALLKFIEQSYSSVAEMREKNPKVAEIPFNSTNKYQMSIHLREDSSQTHVLMMKGAPERILEFCSTFLLNGQEYSMNDEMKEAFQNAYLELGGLGERVLGFCFLNLPSSFSKGFPFNTDEINFPMDNLCFVGLISMIDPPRAAVPDAVSKCRSAGIKVIMVTGDHPITAKAIAKGVGIISEGTETAEEVAARLKIPISKVDASAAKAIVVHGAELKDIQSKQLDQILQNHPEIVFARTSPQQKLIIVEGCQRLGAVVAVTGDGVNDSPALKKADIGIAMGISGSDVSKQAADMILLDDNFASIVTGVEEGRLIFDNLKKSIMYTLTSNIPEITPFLMFIILGIPLPLGTITILCIDLGTDMVPAISLAYESAESDIMKRLPRNPKTDNLVNHRLIGMAYGQIGMIQALAGFFTYFVILAENGFRPVDLLGIRLHWEDKYLNDLEDSYGQQWTYEQRKVVEFTCQTAFFVTIVVVQWADLIISKTRRNSLFQQGMRNKVLIFGILEETLLAAFLSYTPGMDVALRMYPLKITWWLCAIPYSILIFVYDEIRKLLIRQHPDGWVERETYY

SEQ ID NO: 146 - protein, 254 aa, Homo sapiens
MQHASMPMAAAKQCKGIVDCIVRIPKDQGVLSFWRGNLANVIRYSPTQALNFAFKDKYKQIFLAGVDKHTQFCRYFAGNLASGGTAVVYPLDFTRTRLAADVGKSGTEREFRGLGDCLVKISKSDGIRGLYQGFSVSVQAIIIYQAAYFRVYDTANGMFPDPKNTHILVSWMTAQTVTAVAGVLSYPFDTVRRRTMMQSRRKGADIMYTGTVDCWRKIFRDERGEAFFKGVWSNALRGMGVGAGFVLVLYDELK

SEQ ID NO: 147 - protein, 298 aa, Homo sapiens
MTEQAISFAKDFLAGGIAAAISKTAVAPIERVKLLLQVQHASKQIAADKQYKGIVDCIVRIPKEQGVLSFWRGNLANVIRYFPTQALNFAFKDKYKQIFLGGVDKHTQFWRYFAGNLASGGAAGATSLCFVYPLDFARTRLAADVGKSGTEREFRGLGDCLVKITKSDGIRGLYQGFSVSVQGIIIYRAAYFGVYDTAKGMLPDPKNTHIVVSWMIAQTVTAVAGVVSYPFDTVRRRMMMQSGRKGADIMYTGTVDCWRKIFRDEGGKAFFKGAWSNVLRGMGGAFVLVLYDELKKVI

SEQ ID NO: 148 - protein, 418 aa, Homo sapiens [sequence omitted]

SEQ ID NO: 149 - protein, 418 aa, Homo sapiens
MRLNSSAPGTPGTPAADPFQRAQAGLEEALLAPGFGNASGNASERVLAAPSSELDVNTDIYSKVLVTAVYLALFVVGTVGNTVTAFTLARKKSLQSLQSTVHYHLGSLALSDLLTLLLAMPVELYNFIWVHHPWAFGDAGCRGYYFLRDACTYATALNVASLSVERYLAICHPFKAKTLMSRSRTKKFISAIWLASALLTVPMLFTMGEQNRSADGQHAGGLVCTPTIHTATVKVVIQVNTFMSFIFPMVVISVLNTIIANKLTVMVRQAAEQGQVCTVGGEHSTFSMAIEPGRVQALRHGVRVLRAVVIAFVVCWLPYHVRRLMFCYISDEQWTPFLYDFYHYFYMVTNALFYVSSTINPILYNLVSANFRHIFLATLACLCPVWRRRRKRPAFSRKADSVSSNHTLSSNATRETLY

SEQ ID NO: 150 - protein, 724 aa, Homo sapiens
MPEEVHHGEEEVETFAFQAEIAQLMSLIINTFYSNKEIFLRELISNASDALDKIRYESLTDPSKLDSGKELKIDIIPNPQERTLTLVDTGIGMTKADLINNLGTIAKSGTKAFMEALQAGADISMIGQFGVGFYSAYLVAEKVVVITKHNDDEQYAWESSAGGSFTVRADHGEPIGRGTKVILHLKEDQTEYLEERRVKEVVKKHSQFIGYPITLYLEKEREKEISDDEAEEEKGEKEEEDKDDEEKPKIEDVGSDEEDDSGKDKKKKTKKIKEKYIDQEELNKTKPIWTRNPDDITQEEYGEFYKSLTNDWEDHLAVKHFSVEGQLEFRALLFIPRRAPFDLFENKKKKNNIKLYVRRVFIMDSCDELIPEYLNFIRGVVDSEDLPLNISREMLQQSKILKVIRKNIVKKCLELFSELAEDKENYKKFYEAFSKNLKLGIHEDSTNRRRLSELLRYHTSQSGDEMTSLSEYVSRMKETQKSIYYITGESKEQVANSAFVERVRKRGFEVVYMTEPIDEYCVQQLKEFDGKSLVSVTKEGLELPEDEEEKKKMEESKAKFENLCKLMKEILDKKVEKVTISNRLVSSPCCIVTSTYGWTANMERIMKAQALRDNSTMGYMMAKKHLEINPDHPIVETLRQKAEADKNDKAVKDLVVLLFETALLSSGFSLEDPQTHSNRIYRMIKLGLGIDEDEVAAEEPNAAVPDEIPPLEGDEDASRMEEVD

SEQ ID NO: 151 - protein, 732 aa, Homo sapiens
MPEETQTQDQPMEEEEVETFAFQAEIAQLMSLIINTFYSNKEIFLRELISNSSDALDKIRYESLTDPSKLDSGKELHINLIPNKQDRTLTIVDTGIGMTKADLINNLGTIAKSGTKAFMEALQAGADISMIGQFGVGFYSAYLVAEKVTVITKHNDDEQYAWESSAGGSFTVRTDTGEPMGRGTKVILHLKEDQTEYLEERRIKEIVKKHSQFIGYPITLFVEKERDKEVSDDEAEEKEDKEEEKEKEEKESEDKPEIEDVGSDEEEEKKDGDKKKKKKIKEKYIDQEELNKTKPIWTRNPDDITNEEYGEFYKSLTNDWEDHLAVKHFSVEGQLEFRALLFVPRRAPFDLFENRKKKNNIKLYVRRVFIMDNCEELIPEYLNFIRGVVDSEDLPLNISREMLQQSKILKVIRKNLVKKCLELFTELAEDKENYKKFYEQFSKNIKLGIHEDSQNRKKLSELLRYYTSASGDEMVSLKDYCTRMKENQKHIYYITGETKDQVANSAFVERLRKHGLEVIYMIEPIDEYCVQQLKEFEGKTLVSVTKEGLELPEDEEEKKKQEEKKTKFENLCKIMKDILEKKVEKVVVSNRLVTSPCCIVTSTYGWTANMERIMKAQALRDNSTMGYMAAKKHLEINPDHSIIETLRQKAEADKNDKSVKDLVILLYETALLSSGFSLEDPQTHANRIYRMIKLGLGIDEDDPTADDTSAAVTEEMPPLEGDDDTSRMEEVD

SEQ ID NO: 152 - protein, 1640 aa, Homo sapiens
MAQILPVRFQEHFQLQNLGINPANIGFSTLTMESDKFICIREKVGEQAQVTIIDMSDPMAPIRRPISAESAIMNPASKVIALKAGKTLQIFNIEMKSKMKAHTMAEEVIFWKWVSVNTVALVTETAVYHWSMEGDSQPMKMFDRHTSLVGCQVIHYRTDEYQKWLLLVGISAQQNRVVGAMQLYSVDRKVSQPIEGHAAAFAEFKMEGNAKPATLFCFAVRNPTGGKLHIIEVGQPAAGNQPFVKKAVDVFFPPEAQNDFPVAMQIGAKHGVIYLITKYGYLHLYDLESGVCICMNRISADTIFVTAPHKPTSGIIGVNKKGQVLSVCVEEDNIVNYATNVLQNPDLGLRLAVRSNLAGAEKLFVRKFNTLFAQGSYAEAAKVAASAPKGILRTRETVQKFQSIPAQSGQASPLLQYFGILLDQGQLNKLESLELCHLVLQQGRKQLLEKWLKEDKLECSEELGDLVKTTDPMLALSVYLRANVPSKVIQCFAETGQFQKIVLYAKKVGYTPDWIFLLRGVMKISPEQGLQFSRMLVQDEEPLANISQIVDIFMENSLIQQCTSFLLDALKNNRPAEGLLQTWLLEMNLVHAPQVADAILGNKMFTHYDRAHIAQLCEKAGLLQQALEHYTDLYDIKRAVVHTHLLNPEWLVNFFGSLSVEDSVECLHAMLSANIRQNLQLCVQVASKYHEQLGTQALVELFESFKSYKGLFYFLGSIVNFSQDPDVHLKYIQAACKTGQIKEVERICRESSCYNPERVKNFLKEAKLTDQLPLIIVCDRFGFVHDLVLYLYRNNLQRYIEIYVQKVNPSRTPAVIGGLLDVDCSEEVIKHLIMAVRGQFSTDELVAEVEKRNRLKLLLPWLESQIQEGCEEPATHNALAKIYIDSNNSPECFLRENAYYDSSVVGRYCEKRDPHLACVAYERGQCDLELIKVCNENSLFKSEARYLVCRKDPELWAHVLEETNPSRRQLIDQVVQTALSETRDPEEISVTVKAFMTADLPNELIELLEKIVLDNSVFSEHRNLQNLLILTAIKADRTRVMEYISRLDNYDALDIASIAVSSALYEEAFTVFHKFDMNASAIQVLIEHIGNLDRAYEFAERCNEPAVWSQLAQAQLQKDLVKEAINSYIRGDDPSSYLEVVQSASRSNNWEDLVKFLQMARKKGRESYIETELIFALAKTSRVSELEDFINGPNNAHIQQVGDRCYEEGMYEAAKLLYSNVSNFARLASTLVHLGEYQAAVDNSRKASSTRTWKEVCFACMDGQEFRFAQLCGLHIVIHADELEELMCYYQDRGYFEELILLLEAALGLERAHMGMFTELAILYSKFKPQKMLEHLELFWSRVNIPKVLRAAEQAHLWAELVFLYDKYEEYDNAVLTMMSHPTEAWKEGQFKDIITKVANVELCYRALQFYLDYKPLLINDLLLVLSPRLDHTWTVSFFSKAGQLPLVKPYLRSVQSHNNKSVNEALNHLLTEEEDYQGLRASIDAYDNFDNISLAQQLEKHQLMEFRCIAAYLYKGNNWWAQSVELCKKDHLYKDAMQHAAESRDAELAQKLLQWFLEEGKRECFAACLFTCYDLLRPDMVLELAWRHNLVDLAMPYFIQVMREYLSKVDKLDALESLRKQEEHVTEPAPLVFDFDGHE

SEQ ID NO: 153 - protein, 1583 aa, Homo sapiens
MAQILPVRFQEHFQLQNLGINPANIGFSTLTMESDKFICIREKVGEQAQVTIIDMSDPMAPIRRPISAESAIMNPASKVIALKAGKTLQIFNIEMKSKMKAHTMAEEVIFWKWVSVNTVALVTETAVYHWSMEGDSQPMKMFDRHTSLVGCQVIHYRTDEYQKWLLLVGISAQQNRVVGAMQLYSVDRKVSQPIEGHAAAFAEFKMEGNAKPATLFCFAVRNPTGGKLHIIEVGQPAAGNQPFVKKAVDVFFPPEAQNDFPVAMQIGAKHGVIYLITKYGYLHLYDLESGVCICMNRISADTIFVTAPHKPTSGIIGVNKKGQVLSVCVEEDNIVNYATNVLQNPDLGLRLAVRSNLAGAEKLFVRKFNTLFAQGSYAEAAKVAASAPKGILRTRETVQKFQSIPAQSGQASPLLQYFGILLDQGQLNKLESLELCHLVLQQGRKQLLEKWLKEDKLECSEELGDLVKTTDPMLALSVYLRANVPSKVIQCFAETGQFQKIVLYAKKVGYTPDWIFLLRGVMKISPEQGLQFSRMLVQDEEPLANISQIVDIFMENSLIQQCTSFLLDALKNNRPAEGLLQTWLLEMNLVHAPQVADAILGNKMFTHYDRAHIAQLCEKAGLLQQALEHYTDLYDIKRAVVHTHLLNPEWLVNFFGSLSVEDSVECLHAMLSANIRQNLQLCVQVASKYHEQLGTQALVELFESFKSYKGLFYFLGSIVNFSQDPDVHLKYIQAACKTGQIKEVERICRESSCYNPERVKNFLKEAKLTDQLPLIIVCDRFGFVHDLVLYLYRNNLQRYIEIYVQKVNPSRTPAVIGGLLDVDCSEEVIKHLIMAVRGQFSTDELVAEVEKRNRLKLLLPWLESQIQEGCEEPATHNALAKIYIDSNNSPECFLRENAYYDSSVVGRYCEKRDPHLACVAYERGQCDLELIKVCNENSLFKSEARYLVCRKDPELWAHVLEETNPSRRQLIDQVVQTALSETRDPEEISVTVKAFMTADLPNELIELLEKIVLDNSVFSEHRNLQNLLILTAIKADRTRVMEYISRLDNYDALDIASIAVSSALYEEAFTVFHKFDMNASAIQVLIEHIGNLDRAYEFAERCNEPAVWSQLAQAQLQKDLVKEAINSYIRGDDPSSYLEVVQSASRSNNWEDLVKFLQMARKKGRESYIETELIFALAKTSRVSELEDFINGPNNAHIQQVGDRCYEEGMYEAAKLLYSNVSNFARLASTLVHLGEYQAAVDNSRKASSTRTWKEVCFACMDGQEFRFAQLCGLHIVIHADELEELMCYYQDRGYFEELILLLEAALGLERAHMGMFTELAILYSKFKPQKMLEHLELFWSRVNIPKVLRAAEQAHLWAELVFLYDKYEEYDNAVLTMMSHPTEAWKEGQFKDIITKVANVELCYRALQFYLDYKPLLINDLLLVLSPRLDHTWTVSFFSKAGQLPLVKPYLRSVQSHNNKSVNEALNHLLTEEEDYQDAMQHAAESRDAELAQKLLQWFLEEGKRECFAACLFTCYDLLRPDMVLELAWRHNLVDLAMPYFIQVMREYLSKVDKLDALESLRKQEEHVTEPAPLVFDFDGHE

SEQ ID NO: 154 - protein, 1675 aa, Homo sapiens
MAQILPIRFQEHLQLQNLGINPANIGFSTLTMESDKFICIREKVGEQAQVVIIDMNDPSNPIRRPISADSAIMNPASKVIALKAGKTLQIFNIEMKSKMKAHTMTDDVTFWKWISLNTVALVTDNAVYHWSMEGESQPVKMFDRHSSLAGCQIINYRTDAKQKWLLLTGISAQQNRVVGAMQLYSVDRKVSQPIEGHAASFAQFKMEGNAEESTLFCFAVRGQAGGKLHIIEVGTPPTGNQPFPKKAVDVFFPPEAQNDFPVAMQISEKHDVVFLITKYGYIHLYDLETGTCIYMNRISGETIFVTAPHEATAGIIGVNRKGQVLSVCVEEENIIPYITNVLQNPDLALRMAVRNNLAGAEELFARKFNALFAQGNYSEAAKVAANAPKGILRTPDTIRRFQSVPAQPGQTSPLLQYFGILLDQGQLNKYESLELCRPVLQQGRKQLLEKWLKEDKLECSEELGDLVKSVDPTLALSVYLRANVPNKVIQCFAETGQVQKIVLYAKKVGYTPDWIFLLRNVMRISPDQGQQFAQMLVQDEEPLADITQIVDVFMEYNLIQQCTAFLLDALKNNRPSEGPLQTRLLEMNLMHAPQVADAILGNQMFTHYDRAHIAQLCEKAGLLQRALEHFTDLYDIKRAVVHTHLLNPEWLVNYFGSLSVEDSLECLRAMLSANIRQNLQICVQVASKYHEQLSTQSLIELFESFKSFEGLFYFLGSIVNFSQDPDVHFKYIQAACKTGQIKEVERICRESNCYDPERVKNFLKEAKLTDQLPLIIVCDRFDFVHDLVLYLYRNNLQKYIEIYVQKVNPSRLPVVIGGLLDVDCSEDVIKNLILVVRGQFSTDELVAEVEKRNRLKLLLPWLEARIHEGCEEPATHNALAKIYIDSNNNPERFLRENPYYDSRVVGKYCEKRDPHLACVAYERGQCDLELINVCNENSLFKSLSRYLVRRKDPELWGSVLLESNPYRRPLIDQVVQTALSETQDPEEVSVTVKAFMTADLPNELIELLEKIVLDNSVFSEHRNLQNLLILTAIKADRTRVMEYINRLDNYDAPDIANIAISNELFEEAFAIFRKFDVNTSAVQVLIEHIGNLDRAYEFAERCNEPAVWSQLAKAQLQKGMVKEAIDSYIKADDPSSYMEVVQAANTSGNWEELVKYLQMARKKARESYVETELIFALAKTNRLAELEEFINGPNNAHIQQVGDRCYDEKMYDAAKLLYNNVSNFGRLASTLVHLGEYQAAVDGARKANSTRTWKEVCFACVDGKEFRLAQMCGLHIVVHADELEELINYYQDRGYFEELITMLEAALGLERAHMGMFTELAILYSKFKPQKMREHLELFWSRVNIPKVLRAAEQAHLWAELVFLYDKYEEYDNAIITMMNHPTDAWKEGQFKDIITKVANVELYYRAIQFYLEFKPLLLNDLLMVLSPRLDHTRAVNYFSKVKQLPLVKPYLRSVQNHNNKSVNESLNNLFITEEDYQALRTSIDAYDNFDNISLAQRLEKHELIEFRRIAAYLFKGNNRWKQSVELCKKDSLYKDAMQYASESKDTELAEELLQWFLQEEKRECFGACLFTCYDLLRPDVVLETAWRHNIMDFAMPYFIQVMKEYLTKVDKLDASESLRKEEEQATETQPIVYGQPQLMLTAGPSVAVPPQAPFGYGYTAPPYGQPQPGFGYSM

SEQ ID NO: 155 - protein, 1682 aa, Homo sapiens
MAQILPIRFQEHLQLQNLGINPANIGFSTLTMESDKFICIREKVGEQAQVVIIDMNDPSNPIRRPISADSAIMNPASKVIALKAGKTLQIFNIEMKSKMKAHTMTDDVTFWKWISLNTVALVTDNAVYHWSMEGESQPVKMFDRHSSLAGCQIINYRTDAKQKWLLLTGISAQQNRVVGAMQLYSVDRKVSQPIEGHAASFAQFKMEGNAEESTLFCFAVRGQAGGKLHIIEVGTPPTGNQPFPKKAVDVFFPPEAQNDFPVAMQISEKHDVVFLITKYGYIHLYDLETGTCIYMNRISGETIFVTAPHEATAGIIGVNRKGQVLSVCVEEENIIPYITNVLQNPDLALRMAVRNNLAGAEELFARKFNALFAQGNYSEAAKVAANAPKGILRTPDTIRRFQSVPAQPGQTSPLLQYFGILLDQGQLNKYESLELCRPVLQQGRKQLLEKWLKEDKLECSEELGDLVKSVDPTLALSVYLRANVPNKVIQCFAETGQVQKIVLYAKKVGYTPDWIFLLRNVMRISPDQGQQFAQMLVQDEEPLADITQIVDVFMEYNLIQQCTAFLLDALKNNRPSEGPLQTRLLEMNLMHAPQVADAILGNQMFTHYDRAHIAQLCEKAGLLQRALEHFTDLYDIKRAVVHTHLLNPEWLVNYFGSLSVEDSLECLRAMLSANIRQNLQICVQVASKYHEQLSTQSLIELFESFKSFEGLFYFLGSIVNFSQDPDVHFKYIQAACKTGQIKEVERICRESNCYDPERVKNFLKEAKLTDQLPLIIVCDRFDFVHDLVLYLYRNNLQKYIEIYVQKVNPSRLPVVIGGLLDVDCSEDVIKNLILVVRGQFSTDELVAEVEKRNRLKLLLPWLEARIHEGCEEPATHNALAKIYIDSNNNPERFLRENPYYDSRVVGKYCEKRDPHLACVAYERGQCDLELINVCNENSLFKSLSRYLVRRKDPELWGSVLLESNPYRRPLIDQVVQTALSETQDPEEVSVTVKAFMTADLPNELIELLEKIVLDNSVFSEHRNLQNLLILTAIKADRTRVMEYINRLDNYDAPDIANIAISNELFEEAFAIFRKFDVNTSAVQVLIEHIGNLDRAYEFAERCNEPAVWSQLAKAQLQKGMVKEAIDSYIKADDPSSYMEVVQAANTSGNWEELVKYLQMARKKARESYVETELIFALAKTNRLAELEEFINGPNNAHIQQVGDRCYDEKMYDAAKLLYNNVSNFGRLASTLVHLGEYQAAVDGARKANSTRTWKEVCFACVDGKEFRLAQMCGLHIVVHADELEELINYYQDRGYFEELITMLEAALGLERAHMGMFTELAILYSKFKPQKMREHLELFWSRVNIPKVLRAAEQAHLWAELVFLYDKYEEYDNAIITMMNHPTDAWKEGQFKDIITKVANVELYYRAIQFYLEFKPLLLNDLLMVLSPRLDHTRAVNYFSKVKQLPLVKPYLRSVQNHNNKSVNESLNNLFITEEDYQALRTSIDAYDNFDNISLAQRLEKHELIEFRRIAAYLFKGNNRWKQSVELCKKDSLYKDAMQYASESKDTELAEELLQWFLQEEKRECFGACLFTCYDLLRPDVVLETAWRHNIMDFAMPYFIQVMKEYLTKVDAIKEKVDKLDASESLRKEEEQATETQPIVYGQPQLMLTAGPSVAVPPQAPFGYGYTAPPYGQPQPGFGYSM

SEQ ID NO: 156 - protein, 2524 aa, Homo sapiens [sequence omitted]

SEQ ID NO: 157 - protein, 2105 aa, Homo sapiens
MMPSACGRPSLSWSVRRRSSNRRPNCCSSSLRRMQTVQQEQLLQETQALQQSFLSEKDSLLQRERFIEQEKAKLEQLFQDEVAKAQQLREEQQRQQQQMEQERQRLVASMEEARRRQHEAEEGVRRKQEELQQLEQQRRQQEELLAEENQRLREQLQLLEEQHRAALAHSEEVTASQVAATKTLPNGRDALDGPAAEAEPEHSFDGLRRKVSAQRLQEAGILSAEELQRLAQGHTTVDELARREDVRHYLQGRSSIAGLLLKATNEKLSVYAALQRQLLSPGTALILLEAQAASGFLLDPVRNRRLTVNEAVKEGVVGPELHHKLLSAERAVTGYKDPYTGQQISLFQAMQKGLIVREHGIRLLEAQIATGGVIDPVHSHRVPVDVAYRRGYFDEEMNRVLADPSDDTKGFFDPNTHENLTYLQLLERCVEDPETGLCLLPLTDKAAKGGELVYTDSEARDVFEKATVSAPFGKFQGKTVTIWEIINSEYFTAEQRRDLLRQFRTGRITVEKIIKIIITVVEEQEQKGRLCFEGLRSLVPAAELLESRVIDRELYQQLQRGERSVRDVAEVDTVRRALRGANVIAGVWLEEAGQKLSIYNALKKDLLPSDMAVALLEAQAGTGHIIDPATSARLTVDEAVRAGLVGPEFHEKLLSAEKAVTGYRDPYTGQSVSLFQALKKGLIPREQGLRLLDAQLSTGGIVDPSKSHRVPLDVACARGCLDEETSRALSAPRADAKAYSDPSTGEPATYGELQQRCRPDQLTGLSLLPLSEKAARARQEELYSELQARETFEKTPVEVPVGGFKGRTVTVWELISSEYFTAEQRQELLRQFRTGKVTVEKVIKILITIVEEVETLRQERLSFSGLRAPVPASELLASGVLSRAQFEQLKDGKTTVKDLSELGSVRTLLQGSGCLAGIYLEDTKEKVSIYEAMRRGLLRATTAALLLEAQAATGFLVDPVRNQRLYVHEAVKAGVVGPELHEQLLSAEKAVTGYRDPYSGSTISLFQAMQKGLVLRQHGIRLLEAQIATGGIIDPVHSHRVPVDVAYQRGYFSEEMNRVLADPSDDTKGFFDPNTHENLTYRQLLERCVEDPETGLRLLPLKGAEKAEVVETTQVYTEEETRRAFEETQIDIPGGGSHGGSTMSLWEVMQSDLIPEEQRAQLMADFQAGRVTKERMIIIIIEIIEKTEIIRQQGLASYDYVRRRLTAEDLFEARIISLETYNLLREGTRSLREALEAESAWCYLYGTGSVAGVYLPGSRQTLSIYQALKKGLLSAEVARLLLEAQAATGFLLDPVKGERLTVDEAVRKGLVGPELHDRLLSAERAVTGYRDPYTEQTISLFQAMKKELIPTEEALRLLDAQLATGGIVDPRLGFHLPLEVAYQRGYLNKDTHDQLSEPSEVRSYVDPSTDERLSYTQLLRRCRRDDGTGQLLLPLSDARKLTFRGLRKQITMEELVRSQVMDEATALQLREGLTSIEEVTKNLQKFLEGTSCIAGVFVDATKERLSVYQAMKKGIIRPGTAFELLEAQAATGYVIDPIKGLKLTVEEAVRMGIVGPEFKDKLLSAERAVTGYKDPYSGKLISLFQAMKKGLILKDHGIRLLEAQIATGGIIDPEESHRLPVEVAYKRGLFDEEMNEILTDPSDDTKGFFDPNTEENLTYLQLMERCITDPQTGLCLLPLKEKKRERKTSSKSSVRKRRVVIVDPETGKEMSVYEAYRKGLIDHQTYLELSEQECEWEEITISSSDGVVKSMIIDRRSGRQYDIDDAIAKNLIDRSALDQYRAGTLSITEFADMLSGNAGGFRSRSSSVGSSSSYPISPAVSRTQLASWSDPTEETGPVAGILDTETLEKVSITEAMHRNLVDNITGQRLLEAQACTGGIIDPSTGERFPVTDAVNKGLVDKIMVDRINLAQKAFCGFEDPRTKTKMSAAQALKKGWLYYEAGQRFLEVQYLTGGLIEPDTPGRVPLDEALQRGTVDARTAQKLRDVGAYSKYLTCPKTKLKISYKDALDRSMVEEGTGLRLLEAAAQSTKGYYSPYSVSGSGSTAGSRTGSRTGSRAGSRRGSFDATGSGFSMTFSSSSYSSSGYGRRYASGSSASLGGPESAVA

SEQ ID NO: 158 - protein, 181 aa, Homo sapiens
SHSMRYFFTSVSRPGRGEPRFIAVGYVDDTQFVRFDSDAASQRMEPRAPWIEQEGPEYWDQETRNVKAQSQTDRVDLGTLRGYYNQSEAGSHTIQIMYGCDVGSDGRFLRGYRQDAYDGKDYIALNEDLRSWTAADMAAQITKRKWEAAHEAEQLRAYLDATCVEWLRRYLENGKETLQRT

SEQ ID NO: 159 - protein, 365 aa, Homo sapiens [sequence omitted]

SEQ ID NO: 160 - protein, 366 aa, Homo sapiens [sequence omitted]

SEQ ID NO: 161 - protein, 362 aa, Homo sapiens [sequence omitted]

SEQ ID NO: 162 - protein, 703 aa, Homo sapiens [sequence omitted]

SEQ ID NO: 163 - protein, 331 aa, Homo sapiens
MLVMAPRTVLLLLSAALALTETWAGSHSMRYFYTAMSRPGRGEPRFISVGYVDDTQFVRFDSDAASPREEPRAPWIEQEGPEYWDRNTQIFKTNTQTDRESLRNLRGYYNQSEAGSHTLQSMYGCDVGPDGRLLRGHNQYAYDGKDYIALNEDLRSWTAADTAAQITQRKWEAARVAEQERAYLEGTCVEWLRRYLENGKDTLERADPPKTHVTHHPISDHEATLRCWALGFYPAEITLTWQRDGEDQTQDTELVETRPAGDRTFQKWAAVVVPSGEEQRYTCHVQHEGLPKPLTLRWAVFPVHRPHRGHCCWPGCPSSCGHRSCGRCCDV

SEQ ID NO: 164 - protein, 362 aa, Homo sapiens [sequence omitted]

SEQ ID NO: 165 - protein, 362 aa, Homo sapiens [sequence omitted]

SEQ ID NO: 166 - protein, 541 aa, Homo sapiens
MLSPQRVAAAASRGADDAMESSKPGPVQVVLVQKDQHSFELDEKALASILLQDHIRDLDVVVVSVAGAFRKGKSFILDFMLRYLYSQKESGHSNWLGDPEEPLTGFSWRGGSDPETTGIQIWSEVFTVEKPGGKKVAVVLMDTQGAFDSQSTVKDCATIFALSTMTSSVQIYNLSQNIQEDDLQQLQLFTEYGRLAMDEIFQKPFQTLMFLVRDWSFPYEYSYGLQGGMAFLDKRLQVKEHQHEEIQNVRNHIHSCFSDVTCFLLPHPGLQVATSPDFDGKLKDIAGEFKEQLQALIPYVLNPSKLMEKEINGSKVTCRGLLEYFKAYIKIYQGEDLPHPKSMLQATAEANNLAAAASAKDIYYNNMEEVCGGEKPYLSPDILEEKHCEFKQLALDHFKKTKKMGGKDFSFRYQQELEEEIKELYENFCKHNGSKNVFSTFRTPAVLFTGIVALYIASGLTGFIGLEVVAQLFNCMVGLLLIALLTWGYIRYSGQYRELGGAIDFGAAYVLEQASSHIGNSTQATVRDAVVGRPSMDKKAQ

SEQ ID NO: 167 - protein, 495 aa, Homo sapiens
MESSKPGPVQVVLVQKDQHSFELDEKALASILLQDHIRDLDVVVVSVAGAFRKGKSFILDFMLRYLYSQKESGHSNWLGDPEEPLTGFSWRGGSDPETTGIQIWSEVFTVEKPGGKKVAVVLMDTQGAFDSQSTVKDCATIFALSTMTSSVQIYNLSQNIQEDDLQQLQLFTEYGRLAMDEIFQKPFQTLMFLVRDWSFPYEYSYGLQGGMAFLDKRLQVKEHQHEEIQNVRNHIHSCFSDVTCFLLPHPGLQVATSPDFDGKLKDIAGEFKEQLQALIPYVLNPSKLMEKEINGSKVTCRGLLEYFKAYIKIYQGEDLPHPKSMLQATAEANNLAAAASAKDIYYNNMEEVCGGEKPYLSPDILEEKHCEFKQLALDHFKKTKKMGGKDFSFRYQQELEEEIKELYENFCKHNGSKNVFSTFRTPAVLFTGIVALYIASGLTGFIGLEVVAQLFNCMVGLLLIALLTWGYIRYSGQYRELGGAIDFGAAYVLEQ

SEQ ID NO: 168 - protein, 983 aa, Homo sapiens
MTEHKMSVEEVCRKYNTDCVQGLTHSKAQEILARDGPNALTPPPTTPEWVKFCRQLFGGFSILLWIGAILCFLAYGIQAGTEDDPSGDNLYLGIVLAAVVIITGCFSYYQEAKSSKIMESFKNMVPQQALVIREGEKMQVNAEEVVVGDLVEIKGGDRVPADLRIISAHGCKVDNSSLTGESEPQTRSPDCTHDNPLETRNITFFSTNCVEGTARGVVVATGDRTVMGRIATLASGLEVGKTPIAIEIEHFIQLITGVAVFLGVSFFILSLILGYTWLEAVIFLIGIIVANVPEGLLATVTVCLTLTAKRMARKNCLVKNLEAVETLGSTSTICSDKTGTLTQNRMTVAHMWFDNQIHEADTTEDQSGTSFDKSSHTWVALSHIAGLCNRAVFKGGQDNIPVLKRDVAGDASESALLKCIELSSGSVKLMRERNKKVAEIPFNSTNKYQLSIHETEDPNDNRYLLVMKGAPERILDRCSTILLQGKEQPLDEEMKEAFQNAYLELGGLGERVLGFCHYYLPEEQFPKGFAFDCDDVNFTTDNLCFVGLMSMIDPPRAAVPDAVGKCRSAGIKVIMVTGDHPITAKAIAKGVGIISEGNETVEDIAARLNIPVSQVNPRDAKACVIHGTDLKDFTSEQIDEILQNHTEIVFARTSPQQKLIIVEGCQRQGAIVAVTGDGVNDSPALKKADIGVAMGIAGSDVSKQAADMILLDDNFASIVTGVEEGRLIFDNLKKSIAYTLTSNIPEITPFLLFIMANIPLPLGTITILCIDLGTDMVPAISLAYEAAESDIMKRQPRNPRTDKLVNERLISMAYGQIGMIQALGGFFSYFVILAENGFLPGNLVGIRLNWDDRTVNDLEDSYGQQWTYEQRKVVEFTCHTAFFVSIVVVQWADLIICKTRRNSVFQQGMKNKILIFGLFEETALAAFLSYCPGMDVALRMYPLKPSWWFCAFPYSFLIFVYDEIRKLILRRNPGGWVEKETYY

SEQ ID NO: 169 - protein, 1013 aa, Homo sapiens
MGDKKDDKDSPKKNKGKERRDLDDLKKEVAMTEHKMSVEEVCRKYNTDCVQGLTHSKAQEILARDGPNALTPPPTTPEWVKFCRQLFGGFSILLWIGAILCFLAYGIQAGTEDDPSGDNLYLGIVLAAVVIITGCFSYYQEAKSSKIMESFKNMVPQQALVIREGEKMQVNAEEVVVGDLVEIKGGDRVPADLRIISAHGCKVDNSSLTGESEPQTRSPDCTHDNPLETRNITFFSTNCVEGTARGVVVATGDRTVMGRIATLASGLEVGKTPIAIEIEHFIQLITGVAVFLGVSFFILSLILGYTWLEAVIFLIGIIVANVPEGLLATVTVCLTLTAKRMARKNCLVKNLEAVETLGSTSTICSDKTGTLTQNRMTVAHMWFDNQIHEADTTEDQSGTSFDKSSHTWVALSHIAGLCNRAVFKGGQDNIPVLKRDVAGDASESALLKCIELSSGSVKLMRERNKKVAEIPFNSTNKYQLSIHETEDPNDNRYLLVMKGAPERILDRCSTILLQGKEQPLDEEMKEAFQNAYLELGGLGERVLGFCHYYLPEEQFPKGFAFDCDDVNFTTDNLCFVGLMSMIDPPRAAVPDAVGKCRSAGIKVIMVTGDHPITAKAIAKGVGIISEGNETVEDIAARLNIPVSQVNPRDAKACVIHGTDLKDFTSEQIDEILQNHTEIVFARTSPQQKLIIVEGCQRQGAIVAVTGDGVNDSPALKKADIGVAMGIAGSDVSKQAADMILLDDNFASIVTGVEEGRLIFDNLKKSIAYTLTSNIPEITPFLLFIMANIPLPLGTITILCIDLGTDMVPAISLAYEAAESDIMKRQPRNPRTDKLVNERLISMAYGQIGMIQALGGFFSYFVILAENGFLPGNLVGIRLNWDDRTVNDLEDSYGQQWTYEQRKVVEFTCHTAFFVSIVVVQWADLIICKTRRNSVFQQGMKNKILIFGLFEETALAAFLSYCPGMDVALRMYPLKPSWWFCAFPYSFLIFVYDEIRKLILRRNPGGWVEKETYY

SEQ ID NO: 170 - protein, 209 aa, Homo sapiens
MTDAAVSFAKDFLAGGVAAAISKTAVAPIERVKLLLQVQHASKQITADKQYKGIIDCVVRIPKEQGVLSFWRGNLANVIRYFPTQALNFAFKDKYKQIFLGGVDKRTQFWRYFAGNLASGGAAGATSLCFVYPLDFARTRLAADVGKAGAEREFRGLGDCLVKIYKSDGIKGLYQGFNVSVQGIIIYRAAYFGIYDTAKGKFAVGLCFI

SEQ ID NO: 171 - protein, 176 aa, Homo sapiens
KDFLAGGVAAAISKTAVAPIERVKLLLQIFLGGVDKRTQFWRYFAGNLASGGAAGATSLCFVYPLDFARTRLAADVGKAGAEREFRGLGDCLVKIYKSDGIKGLYQGFNVSVQGIIIYRAAYFGIYDTAKGTLDCWRKIARDEGGKAFFKGAWSNVLRGMGGAFVLVLYDEIKKYT

SEQ ID NO: 172 - protein, 298 aa, Homo sapiens
MTDAAVSFAKDFLAGGVAAAISKTAVAPIERVKLLLQVQHASKQITADKQYKGIIDCVVRIPKEQGVLSFWRGNLANVIRYFPTQALNFAFKDKYKQIFLGGVDKRTQFWRYFAGNLASGGAAGATSLCFVYPLDFARTRLAADVGKAGAEREFRGLGDCLVKIYKSDGIKGLYQGFNVSVQGIIIYRAAYFGIYDTAKGMLPDPKNTHIVISWMIAQTVTAVAGLTSYPFDTVRRRMMMQSGRKGTDIMYTGTLDCWRKIARDEGGKAFFKGAWSNVLRGMGGAFVLVLYDEIKKYT

SEQ ID NO: 173 - protein, 1042 aa, Homo sapiens
MHQLFQKTPEIYSVELSGTKDIVKTDKGDGKEKYRGLKNNCLELKKKNHKEEFQKELHLDDHKLSNRELEEKYGTDIIMGLSSTRAAELLARDGPNSLTPPKQTPEIVKFLKQMVGGFSILLWVGAFLCWIAYGIQYSSDKSASLNNVYLGCVLGLVVILTGIFAYYQEAKSTNIMSSFNKMIPQQALVIRDSEKKTIPSEQLVVGDIVEVKGGDQIPADIRVLSSQGCRVDNSSLTGESEPQPRSSEFTHENPLETKNICFYSTTCLEGTVTGMVINTGDRTIIGHIASLASGVGNEKTPIAIEIEHFVHIVAGVAVSIGILFFIIAVSLKYQVLDSIIFLIGIIVANVPEGLLATVTVTLSLTAKRMAKKNCLVKNLEAVETLGSTSIICSDKTGTLTQNRMTVAHLWFDNQIFVADTSEDHSNQVFDQSSRTWASLSKIITLCNRAEFKPGQENVPIMKKAVIGDASETALLKFSEVILGDVMEIRKRNRKVAEIPFNSTNKFQLSIHEMDDPHGKRFLMVMKGAPERILEKCSTIMINGEEHPLDKSTAKTFHTAYMELGGLGERVLGFCHLYLPADEFPETYSFDIDAMNFPTSNLCFVGLLSMIDPPRSTVPDAVTKCRSAGIKVIMVTGDHPITAKAIAKSVGIISANSETVEDIAHRLNIAVEQVNKRDAKAAVVTGMELKDMSSEQLDEILANYQEIVFARTSPQQKLIIVEGCQRQDAVVAVTGDGVNDSPALKKADIGIAMGIAGSDAAKNAADMVLLDDNFASIVTGVEEGRLIFDNLKKTIAYSLTKNIAELCPFLIYIIVGLPLPIGTITILFIDLGTDIIPSIALAYEKAESDIMNRKPRHKNKDRLVNQPLAVYSYLHIGLMQALGAFLVYFTVYAQEGFLPRTLINLRVEWEKDYVNDLKDSYGQEWTRYQREYLEWTGYTAFFVGILVQQIADLIIRKTRRNSIFQQGLFRNKVIWVGITSQIIIGLILSYGLGSVTALSFTMLRAQYWFVAVPHAILIWVYDEVRKLFIRLYPGSWWDKNMYY

SEQ ID NO: 174 - protein, 292 aa, Homo sapiens
MGRQKELVSRCGEMLHIRYRLLRQALAECLGTLILVMFGCGSVAQVVLSRGTHGGFLTINLAFGFAVTLGILIAGQVSGAHLNPAVTFAMCFLAREPWIKLPIYTLAQTLGAFLGAGIVFGLYYDAIWHFADNQLFVSGPNGTAGIFATYPSGHLDMINGFFDQFIGTASLIVCVLAIVDPYNNPVPRGLEAFTVGLVVLVIGTSMGFNSGYAVNPARDFGPRLFTALAGWGSAVFTTGQHWWWVPIVSPLLGSIAGVFVYQLMIGCHLEQPPPSNEEENVKLAHVKHKEQI

SEQ ID NO: 175 - protein, 162 aa, Homo sapiens
MGRQKELVSRCGEMLHIRYRLLRQALAECLGTLILVMFGCGSVAQVVLSRGTHGGFLTINLAFGFAVTLGILIAGQVSGAHLNPAVTFAMCFLAREPWIKLPIYTLAQTLGAFLGAGIVFGLYYGKHSPPCPPPLPPSLCSGPAGTRPFDDRRLGPAQAPGS

SEQ ID NO: 176 - protein, 905 aa, Homo sapiens
MLILVANAIVGVWQERNAESAIEALKEYEPEMGKVIRSDRKGVQRIRARDIVPGDIVEVAVGDKVPADLRLIEIKSTTLRVDQSILTGESVSVTKHTEAIPDPRAVNQDKKNMLFSGTNITSGKAVGVAVATGLHTELGKIRSQMAAVEPERTPLQRKLDEFGRQLSHAISVICVAVWVINIGHFADPAHGGSWLRGAVYYFKIAVALAVAAIPEGLPAVITTCLALGTRRMARKNAIVRSLPSVETLGCTSVICSDKTGTLTTNQMSVCRMFVVAEADAGSCLLHEFTISGTTYTPEGEVRQGDQPVRCGQFDGLVELATICALCNDSALDYNEAKGVYEKVGEATETALTCLVEKMNVFDTDLQALSRVERAGACNTVIKQLMRKEFTLEFSRDRKSMSVYCTPTRPHPTGQGSKMFVKGAPESVIERCSSVRVGSRTAPLTPTSREQILAKIRDWGSGSDTLRCLALATRDAPPRKEDMELDDCSKFVQYETDLTFVGCVGMLDPPRPEVAACITRCYQAGIRVVMITGDNKGTAVAICRRLGIFGDTEDVAGKAYTGREFDDLSPEQQRQACRTARCFARVEPAHKSRIVENLQSFNEITAMTGDGVNDAPALKKAEIGIAMGSGTAVAKSAAEMVLSDDNFASIVAAVEEGRAIYSNMKQFIRYLISSNVGEVVCIFLTAILGLPEALIPVQLLWVNLVTDGLPATALGFNPPDLDIMEKLPRSPREALISGWLFFRYLAIGVYVGLATVAAATWWFVYDAEGPHINFYQLRNFLKCSEDNPLFAGIDCEVFESRFPTTMALSVLVTIEMCNALNSVSENQSLLRMPPWMNPWLLVAVAMSMALHFLILLVPPLPLIFQVTPLSGRQWVVVLQISLPVILLDEALKYLSRNHMHEEMSQK

SEQ ID NO: 177 - protein, 1043 aa, Homo sapiens
MEAAHLLPAADVLRHFSVTAEGGLSPAQVTGARERYGPNELPSEEGKSLWELVLEQFEDLLVRILLLAALVSFVLAWFEEGEETTTAFVEPLVIMLILVANAIVGVWQERNAESAIEALKEYEPEMGKVIRSDRKGVQRIRARDIVPGDIVEVAVGDKVPADLRLIEIKSTTLRVDQSILTGESVSVTKHTEAIPDPRAVNQDKKNMLFSGTNITSGKAVGVAVATGLHTELGKIRSQMAAVEPERTPLQRKLDEFGRQLSHAISVICVAVWVINIGHFADPAHGGSWLRGAVYYFKIAVALAVAAIPEGLPAVITTCLALGTRRMARKNAIVRSLPSVETLGCTSVICSDKTGTLTTNQMSVCRMFVVAEADAGSCLLHEFTISGTTYTPEGEVRQGDQPVRCGQFDGLVELATICALCNDSALDYNEAKGVYEKVGEATETALTCLVEKMNVFDTDLQALSRVERAGACNTVIKQLMRKEFTLEFSRDRKSMSVYCTPTRPHPTGQGSKMFVKGAPESVIERCSSVRVGSRTAPLTPTSREQILAKIRDWGSGSDTLRCLALATRDAPPRKEDMELDDCSKFVQYETDLTFVGCVGMLDPPRPEVAACITRCYQAGIRVVMITGDNKGTAVAICRRLGIFGDTEDVAGKAYTGREFDDLSPEQQRQACRTARCFARVEPAHKSRIVENLQSFNEITAMTGDGVNDAPALKKAEIGIAMGSGTAVAKSAAEMVLSDDNFASIVAAVEEGRAIYSNMKQFIRYLISSNVGEVVCIFLTAILGLPEALIPVQLLWVNLVTDGLPATALGFNPPDLDIMEKLPRSPREALISGWLFFRYLAIGVYVGLATVAAATWWFVYDAEGPHINFYQLRNFLKCSEDNPLFAGIDCEVFESRFPTTMALSVLVTIEMCNALNSVSENQSLLRMPPWMNPWLLVAVAMSMALHFLILLVPPLPLIFQVTPLSGRQWVVVLQISLPVILLDEALKYLSRNHMHACLYPGLLRTVSQAWSRQPLTTSWTPDHTGRNEPEVSAGNRVESPVCTSD

SEQ ID NO: 178 - protein, 1007 aa, Homo sapiens [sequence omitted]

SEQ ID NO: 179 - protein, 993 aa, Homo sapiens
MEAAHLLPAADVLRHFSVTAEGGLSPAQVTGARERYGPNGKSLWELVLEQFEDLLVRILLLAALVSFVLAWFEEGEETTTAFVEPLVIMLILVANAIVGVWQERNAESAIEALKEYEPEMGKVIRSDRKGVQRIRARDIVPGDIVEVAVGDKVPADLRLIEIKSTTLRVDQSILTGESVSVTKHTEAIPDPRAVNQDKKNMLFSGTNITSGKAVGVAVATGLHTELGKIRSQMAAVEPERTPLQRKLDEFGRQLSHAISVICVAVWVINIGHFADPAHGGSWLRGAVYYFKIAVALAVAAIPEGLPAVITTCLALGTRRMARKNAIVRSLPSVETLGCTSVICSDKTGTLTTNQMSVCRMFVVAEADAGSCLLHEFTISGTTYTPEGEVRQGDQPVRCGQFDGLVELATICALCNDSALDYNEAKGVYEKVGEATETALTCLVEKMNVFDTDLQALSRVERAGACNTVIKQLMRKEFTLEFSRDRKSMSVYCTPTRPHPTGQGSKMFVKGAPESVIERCSSVRVGSRTAPLTPTSREQILAKIRDWGSGSDTLRCLALATRDAPPRKEDMELDDCSKFVQYETDLTFVGCVGMLDPPRPEVAACITRCYQAGIRVVMITGDNKGTAVAICRRLGIFGDTEDVAGKAYTGREFDDLSPEQQRQACRTARCFARVEPAHKSRIVENLQSFNEITAMTGDGVNDAPALKKAEIGIAMGSGTAVAKSAAEMVLSDDNFASIVAAVEEGRAIYSNMKQFIRYLISSNVGEVVCIFLTAILGLPEALIPVQLLWVNLVTDGLPATALGFNPPDLDIMEKLPRSPREALISGWLFFRYLAIGVYVGLATVAAATWWFVYDAEGPHINFYQLRNFLKCSEDNPLFAGIDCEVFESRFPTTMALSVLVTIEMCNALNSVSENQSLLRMPPWMNPWLLVAVAMSMALHFLILLVPPLPLIFQVTPLSGRQWVVVLQISLPVILLDEALKYLSRNHMHEEMSQK

SEQ ID NO: 180 - protein, 361 aa, Homo sapiens
MFSSVAHLARANPFNTPHLQLVHDGLGDLRSSSPGPTGQPRRPRNLAAAAVEEYSCEFGSAKYYALCGFGGVLSCGLTHTAVVPLDLVKCRMQVDPQKYKGIFNGFSVTLKEDGVRGLAKGWAPTFLGYSMQGLCKFGFYEVFKVLYSNMLGEENTYLWRTSLYLAASASAEFFADIALAPMEAAKVRIQTQPGYANTLRDAAPKMYKEEGLKAFYKGVAPLWMRQIPYTMMKFACFERTVEALYKFVVPKPRSECSKPEQLVVTFVAGYIAGVFCAIVSHPADSVVSVLNKEKGSSASLVLKRLGFKGVWKGLFARIIMIGTLTALQWFIYDSVKVYFRLPRPPPPEMPESLKKKLGLTQ

SEQ ID NO: 181 - protein, 362 aa, Homo sapiens
MFSSVAHLARANPFNTPHLQLVHDGLGDLRSSSPGPTGQPRRPRNLAAAAVEEQYSCDYGSGRFFILCGLGGIISCGTTHTALVPLDLVKCRMQVDPQKYKGIFNGFSVTLKEDGVRGLAKGWAPTFLGYSMQGLCKFGFYEVFKVLYSNMLGEENTYLWRTSLYLAASASAEFFADIALAPMEAAKVRIQTQPGYANTLRDAAPKMYKEEGLKAFYKGVAPLWMRQIPYTMMKFACFERTVEALYKFVVPKPRSECSKPEQLVVTFVAGYIAGVFCAIVSHPADSVVSVLNKEKGSSASLVLKRLGFKGVWKGLFARIIMIGTLTALQWFIYDSVKVYFRLPRPPPPEMPESLKKKLGLTQ

SEQ ID NO: 182 - protein, 231 aa, Homo sapiens
MQGLCKFGFYEVFKVLYSNMLGEENTYLWRTSLYLAASASAEFFADIALAPMEAAKVRIQTQPGYANTLRDAAPKMYKEEGLKAFYKGVAPLWMRQIPYTMMKFACFERTVEALYKFVVPKPRSECSKPEQLVVTFVAGYIAGVFCAIVSHPADSVVSVLNKEKGSSASLVLKRLGFKGVWKGLFARIIMIGTLTALQWFIYDSVKVYFRLPRPPPPEMPESLKKKLGLTQ

SEQ ID NO: 183 - protein, 249 aa, Homo sapiens [sequence omitted]

SEQ ID NO: 184 - protein, 757 aa, Homo sapiens
MGKGVGRDKYEPAAVSEQGDKKGKKGKKDRDMDELKKEVSMDDHKLSLDELHRKYGTDLSRGLTSARAAEILARDGPNALTPPPTTPEWIKFCRQLFGGFSMLLWIGAILCFLAYSIQAATEEEPQNDNLYLGVVLSAVVIITGCFSYYQEAKSSKIMESFKNMVPQQALVIRNGEKMSINAEEVVVGDLVEVKGGDRIPADLRIISANGCKVDNSSLTGESEPQTRSPDFTNENPLETRNIAFFSTNCVEGTARGIVVYTGDRTVMGRIATLASGLEGGQTPIAAEIEHFIHIITGVAVFLGVSFFILSLILEYTWLEAVIFLIGIIVANVPEGLLATVTVCLTLTAKRMARKNCLVKNLEAVETLGSTSTICSDKTGTLTQNRMTVAHMWFDNQIHEADTTENQSGVSFDKTSATWLALSRIAGLCNRAVFQANQENLPILKRAVAGDASESALLKCIELCCGSVKEMRERYAKIVEIPFNSTNKYQLSIHKNPNTSEPQHLLVMKGAPERILDRCSSILLHGKEQPLDEELKDAFQNAYLELGGLGERVLGFCHLFLPDEQFPEGFQFDTDDVNFPIDNLCFVGLISMIDPPRAAVPDAVGKCRSAGIKVIMVTGDHPITAKAIAKGVGIISEGNETTYEQRKIVEFTCHTAFFVSIVVVQWADLVICKTRRNSVFQQGMKNKILIFGLFEETALAAFLSYCPGMGVALRMYPLKPTWWFCAFPYSLLIFVYDEVRKLIIRRRPGGWVEKETYY

SEQ ID NO: 185 - protein, 470 aa, Homo sapiens
MGKGVGRDKYEPAAVSEQGDKKGKKGKKDRDMDELKKEVSMDDHKLSLDELHRKYGTDLSRGLTSARAAEILARDGPNALTPPPTTPEWIKFCRQLFGGFSMLLWIGAILCFLAYSIQAATEEEPQNDNLYLGVVLSAVVIITGCFSYYQEAKSSKIMESFKNMVPQQALVIRNGEKMSINAEEVVVGDLVEVKGGDRIPADLRIISANGCKVDNSSLTGESEPQTRSPDFTNENPLETRNIAFFSTNCVEGTARGIVVYTGDRTVMGRIATLASGLEGGQTPIAAEIEHFIHIITGVAVFLGVSFFILSLILEYTWLEAVIFLIGIIVANVPEGLLATVTVCLTLTAKRMARKNCLVKNLEAVETLGSTSTICSDKTGTLTQNRMTVAHMWFDNQIHEADTTENQSGVSFDKTSATWLALSRIAGLCNRAVFQANQENLPSLLIFVYDEVRKLIIRRRPGGWVEKETYY

SEQ ID NO: 186 - protein, 729 aa, Homo sapiens
MGKGVGRDKYEPAAVSEQGDKKGKKGKKDRDMDELKKEVSMDDHKLSLDELHRKYGTDLSRGLTSARAAEILARDGPNALTPPPTTPEWIKFCRQLFGGFSMLLWIGAILCFLAYSIQAATEEEPQNDNLYLGVVLSAVVIITGCFSYYQEAKSSKIMESFKNMVPQQALVIRNGEKMSINAEEVVVGDLVEVKGGDRIPADLRIISANGCKVDNSSLTGESEPQTRSPDFTNENPLETRNIAFFSTNCVEGTARGIVVYTGDRTVMGRIATLASGLEGGQTPIAAEIEHFIHIITGVAVFLGVSFFILSLILEYTWLEAVIFLIGIIVANVPEGLLATVTVCLTLTAKRMARKNCLVKNLEAVETLGSTSTICSDKTGTLTQNRMTVAHMWFDNQIHEADTTENQSGVSFDKTSATWLALSRIAGLCNRAVFQANQENLPILKRAVAGDASESALLKCIELCCGSVKEMRERYAKIVEIPFNSTNKYQLSIHKNPNTSEPQHLLVMKGAPERILDRCSSILLHGKEQPLDEELKDAFQNAYLELGGLGERVLGFCHLFLPDEQFPEGFQFDTDDVNFPIDNLCFVGLISMIDPPRAAVPDAVGKCRSAGIKTYEQRKIVEFTCHTAFFVSIVVVQWADLVICKTRRNSVFQQGMKNKILIFGLFEETALAAFLSYCPGMGVALRMYPLKPTWWFCAFPYSLLIFVYDEVRKLIIRRRPGGWVEKETYY

SEQ ID NO: 187 - protein, 992 aa, Homo sapiens
MDELKKEVSMDDHKLSLDELHRKYGTDLSRGLTSARAAEILARDGPNALTPPPTTPEWIKFCRQLFGGFSMLLWIGAILCFLAYSIQAATEEEPQNDNLYLGVVLSAVVIITGCFSYYQEAKSSKIMESFKNMVPQQALVIRNGEKMSINAEEVVVGDLVEVKGGDRIPADLRIISANGCKVDNSSLTGESEPQTRSPDFTNENPLETRNIAFFSTNCVEGTARGIVVYTGDRTVMGRIATLASGLEGGQTPIAAEIEHFIHIITGVAVFLGVSFFILSLILEYTWLEAVIFLIGIIVANVPEGLLATVTVCLTLTAKRMARKNCLVKNLEAVETLGSTSTICSDKTGTLTQNRMTVAHMWFDNQIHEADTTENQSGVSFDKTSATWLALSRIAGLCNRAVFQANQENLPILKRAVAGDASESALLKCIELCCGSVKEMRERYAKIVEIPFNSTNKYQLSIHKNPNTSEPQHLLVMKGAPERILDRCSSILLHGKEQPLDEELKDAFQNAYLELGGLGERVLGFCHLFLPDEQFPEGFQFDTDDVNFPIDNLCFVGLISMIDPPRAAVPDAVGKCRSAGIKVIMVTGDHPITAKAIAKGVGIISEGNETVEDIAARLNIPVSQVNPRDAKACVVHGSDLKDMTSEQLDDILKYHTEIVFARTSPQQKLIIVEGCQRQGAIVAVTGDGVNDSPALKKADIGVAMGIAGSDVSKQAADMILLDDNFASIVTGVEEGRLIFDNLKKSIAYTLTSNIPEITPFLIFIIANIPLPLGTVTILCIDLGTDMVPAISLAYEQAESDIMKRQPRNPKTDKLVNERLISMAYGQIGMIQALGGFFTYFVILAENGFLPIHLLGLRVDWDDRWINDVEDSYGQQWTYEQRKIVEFTCHTAFFVSIVVVQWADLVICKTRRNSVFQQGMKNKILIFGLFEETALAAFLSYCPGMGVALRMYPLKPTWWFCAFPYSLLIFVYDEVRKLIIRRRPGGWVEKETYY

SEQ ID NO: 188 - protein, 1023 aa, Homo sapiens
MGKGVGRDKYEPAAVSEQGDKKGKKGKKDRDMDELKKEVSMDDHKLSLDELHRKYGTDLSRGLTSARAAEILARDGPNALTPPPTTPEWIKFCRQLFGGFSMLLWIGAILCFLAYSIQAATEEEPQNDNLYLGVVLSAVVIITGCFSYYQEAKSSKIMESFKNMVPQQALVIRNGEKMSINAEEVVVGDLVEVKGGDRIPADLRIISANGCKVDNSSLTGESEPQTRSPDFTNENPLETRNIAFFSTNCVEGTARGIVVYTGDRTVMGRIATLASGLEGGQTPIAAEIEHFIHIITGVAVFLGVSFFILSLILEYTWLEAVIFLIGIIVANVPEGLLATVTVCLTLTAKRMARKNCLVKNLEAVETLGSTSTICSDKTGTLTQNRMTVAHMWFDNQIHEADTTENQSGVSFDKTSATWLALSRIAGLCNRAVFQANQENLPILKRAVAGDASESALLKCIELCCGSVKEMRERYAKIVEIPFNSTNKYQLSIHKNPNTSEPQHLLVMKGAPERILDRCSSILLHGKEQPLDEELKDAFQNAYLELGGLGERVLGFCHLFLPDEQFPEGFQFDTDDVNFPIDNLCFVGLISMIDPPRAAVPDAVGKCRSAGIKVIMVTGDHPITAKAIAKGVGIISEGNETVEDIAARLNIPVSQVNPRDAKACVVHGSDLKDMTSEQLDDILKYHTEIVFARTSPQQKLIIVEGCQRQGAIVAVTGDGVNDSPALKKADIGVAMGIAGSDVSKQAADMILLDDNFASIVTGVEEGRLIFDNLKKSIAYTLTSNIPEITPFLIFIIANIPLPLGTVTILCIDLGTDMVPAISLAYEQAESDIMKRQPRNPKTDKLVNERLISMAYGQIGMIQALGGFFTYFVILAENGFLPIHLLGLRVDWDDRWINDVEDSYGQQWTYEQRKIVEFTCHTAFFVSIVVVQWADLVICKTRRNSVFQQGMKNKILIFGLFEETALAAFLSYCPGMGVALRMYPLKPTWWFCAFPYSLLIFVYDEVRKLIIRRRPGGWVEKETYY

SEQ ID NO: 189 - protein, 917 aa, Homo sapiens
MGKVYRQDRKSVQRIKAKDIVPGDIVEIAVGDKVPADIRLTSIKSTTLRVDQSILTGESVSVIKHTDPVPDPRAVNQDKKNMLFSGTNIAAGKAMGVVVATGVNTEIGKIRDEMVATEQERTPLQQKLDEFGEQLSKVISLICIAVWIINIGHFNDPVHGGSWIRGAIYYFKIAVALAVAAIPEGLPAVITTCLALGTRRMAKKNAIVRSLPSVETLGCTSVICSDKTGTLTTNQMSVCRMFILDRVEGDTCSLNEFTITGSTYAPIGEVHKDDKPVNCHQYDGLVELATICALCNDSALDYNEAKGVYEKVGEATETALTCLVEKMNVFDTELKGLSKIERANACNSVIKQLMKKEFTLEFSRDRKSMSVYCTPNKPSRTSMSKMFVKGAPEGVIDRCTHIRVGSTKVPMTSGVKQKIMSVIREWGSGSDTLRCLALATHDNPLRREEMHLEDSANFIKYETNLTFVGCVGMLDPPRIEVASSVKLCRQAGIRVIMITGDNKGTAVAICRRIGIFGQDEDVTSKAFTGREFDELNPSAQRDACLNARCFARVEPSHKSKIVEFLQSFDEITAMTGDGVNDAPALKKAEIGIAMGSGTAVAKTASEMVLADDNFSTIVAAVEEGRAIYNNMKQFIRYLISSNVGEVVCIFLTAALGFPEALIPVQLLWVNLVTDGLPATALGFNPPDLDIMNKPPRNPKEPLISGWLFFRYLAIGCYVGAATVGAAAWWFIAADGGPRVSFYQLSHFLQCKEDNPDFEGVDCAIFESPYPMTMALSVLVTIEMCNALNSLSENQSLLRMPPWENIWLVGSICLSMSLHFLILYVEPLPLIFQITPLNVTQWLMVLKISLPVILMDETLKFVARNYLEPGKECVQPATKSCSFSACTDGISWPFVLLIMPLVIWVYSTDTNFSDMFWS

SEQ ID NO: 190 - protein, 518 aa, Homo sapiens [sequence omitted]

SEQ ID NO: 191 - protein, 507 aa, Homo sapiens
MTSGVKQKIMSVIREWGSGSDTLRCLALATHDNPLRREEMHLEDSANFIKYETNLTFVGCVGMLDPPRIEVASSVKLCRQAGIRVIMITGDNKGTAVAICRRIGIFGQDEDVTSKAFTGREFDELNPSAQRDACLNARCFARVEPSHKSKIVEFLQSFDEITAMTGDGVNDAPALKKAEIGIAMGSGTAVAKTASEMVLADDNFSTIVAAVEEGRAIYNNMKQFIRYLISSNVGEVVCIFLTAALGFPEALIPVQLLWVNLVTDGLPATALGFNPPDLDIMNKPPRNPKEPLISGWLFFRYLAIGCYVGAATVGAAAWWFIAADGGPRVSFYQLSHFLQCKEDNPDFEGVDCAIFESPYPMTMALSVLVTIEMCNALNSLSENQSLLRMPPWENIWLVGSICLSMSLHFLILYVEPLPLIFQITPLNVTQWLMVLKISLPVILMDETLKFVARNYLEPGKECVQPATKSCSFSACTDGISWPFVLLIMPLVIWVYSTDTNFSDMFWS

SEQ ID NO: 192 - protein, 872 aa, Homo sapiens
MGKVYRQDRKSVQRIKAKDIVPGDIVEIAVGDKVPADIRLTSIKSTTLRVDQSILTGESVSVIKHTDPVPDPRAVNQDKKNMLFSGTNIAAGKAMGVVVATGVNTEIGKIRDEMVATEQERTPLQQKLDEFGEQLSKVISLICIAVWIINIGHFNDPVHGGSWIRGAIYYFKIAVALAVAAIPEGLPAVITTCLALGTRRMAKKNAIVRSLPSVETLGCTSVICSDKTGTLTTNQMSVCRMFILDRVEGDTCSLNEFTITGSTYAPIGEVHKDDKPVNCHQYDGLVELATICALCNDSALDYNEAKGVYEKVGEATETALTCLVEKMNVFDTELKGLSKIERANACNSVIKQLMKKEFTLEFSRDRKSMSVYCTPNKPSRTSMSKMFVKGAPEGVIDRCTHIRVGSTKVPMTSGVKQKIMSVIREWGSGSDTLRCLALATHDNPLRREEMHLEDSANFIKYETNLTFVGCVGMLDPPRIEVASSVKLCRQAGIRVIMITGDNKGTAVAICRRIGIFGQDEDVTSKAFTGREFDELNPSAQRDACLNARCFARVEPSHKSKIVEFLQSFDEITAMTGDGVNDAPALKKAEIGIAMGSGTAVAKTASEMVLADDNFSTIVAAVEEGRAIYNNMKQFIRYLISSNVGEVVCIFLTAALGFPEALIPVQLLWVNLVTDGLPATALGFNPPDLDIMNKPPRNPKEPLISGWLFFRYLAIGCYVGAATVGAAAWWFIAADGGPRVSFYQLSHFLQCKEDNPDFEGVDCAIFESPYPMTMALSVLVTIEMCNALNSLSENQSLLRMPPWENIWLVGSICLSMSLHFLILYVEPLPLIFQITPLNVTQWLMVLKISLPVILMDETLKFVARNYLEPAILE

SEQ ID NO: 193 - protein, 1009 aa, Homo sapiens
MGRGAGREYSPAATTAENGGGKKKQKEKELDELKKEVAMDDHKLSLDELGRKYQVDLSKGLTNQRAQDVLARDGPNALTPPPTTPEWVKFCRQLFGGFSILLWIGAILCFLAYGIQAAMEDEPSNDNLYLGVVLAAVVIVTGCFSYYQEAKSSKIMDSFKNMVPQQALVIREGEKMQINAEEVVVGDLVEVKGGDRVPADLRIISSHGCKVDNSSLTGESEPQTRSPEFTHENPLETRNICFFSTNCVEGTARGIVIATGDRTVMGRIATLASGLEVGRTPIAMEIEHFIQLITGVAVFLGVSFFVLSLILGYSWLEAVIFLIGIIVANVPEGLLATVTVCLTLTAKRMARKNCLVKNLEAVETLGSTSTICSDKTGTLTQNRMTVAHMWFDNQIHEADTTEDQSGATFDKRSPTWTALSRIAGLCNRAVFKAGQENISVSKVGAGDASESALLKCIELSCGSVRKMRDRNPKVAEIPFNSTNKYQLSIHEREDSPQSHVLVMKGAPERILDRCSTILVQGKEIPLDKEMQDAFQNAYMELGGLGERVLGFCQLNLPSGKFPRGFKFDTDELNFPTEKLCFVGLMSMIDPPRAAVPDAVGKCRSAGIKVIMVTGDHPITAKAIAKGVGIISEGVSCLCPHPPSREAKACVVHGSDLKDMTSEQLDEILKNHTEIVFARTSPQQKLIIVEGCQRQGAIVAVTGDGVNDSPALKKADIGIAMGISGSDVSKQAADMILLDDNFASIVTGVEEGRLIFDNLKKSIAYTLTSNIPEITPFLLFIIANIPLPLGTVTILCIDLGTDMVPAISLAYEAAESDIMKRQPRNSQTDKLVNERLISMAYGQIGMIQALGGFFTYFVILAENGFLPSRLLGIRLDWDDRTMNDLEDSYGQEWTYEQRKVVEFTCHTAFFASIVVVQWADLIICKTRRNSVFQQGMKNKILIFGLLEETALAAFLSYCPGMGVALRMYPLKVTWWFCAFPYSLLIFIYDEVRKLILRRYPGGWVEKETYY

SEQ ID NO: 194 - protein, 1020 aa, Homo sapiens
MGRGAGREYSPAATTAENGGGKKKQKEKELDELKKEVAMDDHKLSLDELGRKYQVDLSKGLTNQRAQDVLARDGPNALTPPPTTPEWVKFCRQLFGGFSILLWIGAILCFLAYGIQAAMEDEPSNDNLYLGVVLAAVVIVTGCFSYYQEAKSSKIMDSFKNMVPQQALVIREGEKMQINAEEVVVGDLVEVKGGDRVPADLRIISSHGCKVDNSSLTGESEPQTRSPEFTHENPLETRNICFFSTNCVEGTARGIVIATGDRTVMGRIATLASGLEVGRTPIAMEIEHFIQLITGVAVFLGVSFFVLSLILGYSWLEAVIFLIGIIVANVPEGLLATVTVCLTLTAKRMARKNCLVKNLEAVETLGSTSTICSDKTGTLTQNRMTVAHMWFDNQIHEADTTEDQSGATFDKRSPTWTALSRIAGLCNRAVFKAGQENISVSKRDTAGDASESALLKCIELSCGSVRKMRDRNPKVAEIPFNSTNKYQLSIHEREDSPQSHVLVMKGAPERILDRCSTILVQGKEIPLDKEMQDAFQNAYMELGGLGERVLGFCQLNLPSGKFPRGFKFDTDELNFPTEKLCFVGLMSMIDPPRAAVPDAVGKCRSAGIKVIMVTGDHPITAKAIAKGVGIISEGNETVEDIAARLNIPMSQVNPREAKACVVHGSDLKDMTSEQLDEILKNHTEIVFARTSPQQKLIIVEGCQRQGAIVAVTGDGVNDSPALKKADIGIAMGISGSDVSKQAADMILLDDNFASIVTGVEEGRLIFDNLKKSIAYTLTSNIPEITPFLLFIIANIPLPLGTVTILCIDLGTDMVPAISLAYEAAESDIMKRQPRNSQTDKLVNERLISMAYGQIGMIQALGGFFTYFVILAENGFLPSRLLGIRLDWDDRTMNDLEDSYGQEWTYEQRKVVEFTCHTAFFASIVVVQWADLIICKTRRNSVFQQGMKNKILIFGLLEETALAAFLSYCPGMGVALRMYPLKVTWWFCAFPYSLLIFIYDEVRKLILRRYPGGWVEKETYY

SEQ ID NO: 195 - protein, 663 aa, Homo sapiens
MSARLPVLSPPRWPRLLLLSLLLLGAVPGPRRSGAFYLPGLAPVNFCDEEKKSDECKAEIELFVNRLDSVESVLPYEYTAFDFCQASEGKRPSENLGQVLFGERIEPSPYKFTFNKKETCKLVCTKTYHTEKAEDKQKLEFLKKSMLLNYQHHWIVDNMPVTWCYDVEDGQRFCNPGFPIGCYITDKGHAKDACVISSDFHERDTFYIFNHVDIKIYYHVVETGSMGARLVAAKLEPKSFKHTHIDKPDCSGPPMDISNKASGEIKIAYTYSVSFEEDDKIRWASRWDYILESMPHTHIQWFSIMNSLVIVLFLSGMVAMIMLRTLHKDIARYNQMDSTEDAQEEFGWKLVHGDIFRPPRKGMLLSVFLGSGTQILIMTFVTLFFACLGFLSPANRGALMTCAVVLWVLLGTPAGYVAARFYKSFGGEKWKTNVLLTSFLCPGIVFADFFIMNLILWGEGSSAAIPFGTLVAILALWFCISVPLTFIGAYFGFKKNAIEHPVRTNQIPRQIPEQSFYTKPLPGIIMGGILPFGCIFIQLFFILNSIWSHQMYYMFGFLFLVFIILVITCSEATILLCYFHLCAEDYHWQWRSFLTSGFTAVYFLIYAVHYFFSKLQITGTASTILYFGYTMIMVLIFFLFTGTIGFFACFWFVTKIYSVVKVD

SEQ ID NO: 196 - protein, 283 aa, Homo sapiens
MEPPGDWGPPPWRSTPKTDVLRLVLYLTFLGAPCYAPALPSCKEDEYPVGSECCPKCSPGYRVKEACGELTGTVCEPCPPGTYIAHLNGLSKCLQCQMCDPAMGLRASRNCSRTENAVCGCSPGHFCIVQDGDHCAACRAYATSSPGQRVQKGGTESQDTLCQNCPPGTFSPNGTLEECQHQTKCSWLVTKAGAGTSSSHWVWWFLSGSLVIVIVCSTVGLIICVKRRKPRGDVVKVIVSVQRKRQEAEGEATVIEALQAPPDVTTVAVEETIPSFTGRSPNH

SEQ ID NO: 197 - protein, 172 aa, Homo sapiens
MVSRPPRTPLSPSSWTPAMGLRASRNCSRTENAVCGCSPGHFCIVQDGDHCAACRAYATSSPGQRVQKGGTESQDTLCQNCPPGTFSPNGTLEECQHQTKCSWLVTKAGAGTSSSHWVWWFLSGSLVIVIVCSTVGLIICVKRRKPRGDVVKVIVSVQAKCGEINDVDDEAP

SEQ ID NO: 198 - protein, 199 aa, Homo sapiens
MVSRPPRTPLSPSSWTPAMGLRASRNCSRTENAVCGCSPGHFCIVQDGDHCAACRAYATSSPGQRVQKGGTESQDTLCQNCPPGTFSPNGTLEECQHQTKCSWLVTKAGAGTSSSHWVWWFLSGSLVIVIVCSTVGLIICVKRRKPRGDVVKVIVSVQRKRQEAEGEATVIEALQAPPDVTTVAVEETIPSFTGRSPNH

SEQ ID NO: 199 - protein, 960 aa, Homo sapiens
MFHSSAMVNSHRKPMFNIHRGFYCLTAILPQICICSQFSVPSSYHFTEDPGAFPVATNGERFPWQELRLPSVVIPLHYDLFVHPNLTSLDFVASEKIEVLVSNATQFIILHSKDLEITNATLQSEEDSRYMKPGKELKVLSYPAHEQIALLVPEKLTPHLKYYVAMDFQAKLGDGFEGFYKSTYRTLGGETRILAVTDFEPTQARMAFPCFDEPLFKANFSIKIRRESRHIALSNMPKVKTIELEGGLLEDHFETTVKMSTYLVAYIVCDFHSLSGFTSSGVKVSIYASPDKRNQTHYALQASLKLLDFYEKYFDIYYPLSKLDLIAIPDFAPGAMENWGLITYRETSLLFDPKTSSASDKLWVTRVIAHELAHQWFGNLVTMEWWNDIWLKEGFAKYMELIAVNATYPELQFDDYFLNVCFEVITKDSLNSSRPISKPAETPTQIQEMFDEVSYNKGACILNMLKDFLGEEKFQKGIIQYLKKFSYRNAKNDDLWSSLSNSCLESDFTSGGVCHSDPKMTSNMLAFLGENAEVKEMMTTWTLQKGIPLLVVKQDGCSLRLQQERFLQGVFQEDPEWRALQERYLWHIPLTYSTSSSNVIHRHILKSKTDTLDLPEKTSWVKFNVDSNGYYIVHYEGHGWDQLITQLNQNHTLLRPKDRVGLIHDVFQLVGAGRLTLDKALDMTYYLQHETSSPALLEGLSYLESFYHMMDRRNISDISENLKRYLLQYFKPVIDRQSWSDKGSVWDRMLRSALLKLACDLNHAPCIQKAAELFSQWMESSGKLNIPTDVLKIVYSVGAQTTAGWNYLLEQYELSMSSAEQNKILYALSTSKHQEKLLKLIELGMEGKVIKTQNLAALLHAIARRPKGQQLAWDFVRENWTHLLKKFDLGSYDIRMIISGTTAHFSSKDKLQEVKLFFESLEAQGSHLDIFQTVLETITKNIKWLEKNLPTLRTWLMVNT

SEQ ID NO: 200 - protein, 532 aa, Homo sapiens
MFHSSAMVNSHRKPMFNIHRGFYCLTAILPQICICSQFSVPSSYHFTEDPGAFPVATNGERFPWQELRLPSVVIPLHYDLFVHPNLTSLDFVASEKIEVLVSNATQFIILHSKDLEITNATLQSEEDSRYMKPGKELKVLSYPAHEQIALLVPEKLTPHLKYYVAMDFQAKLGDGFEGFYKSTYRTLGGETRILAVTDFEPTQARMAFPCFDEPLFKANFSIKIRRESRHIALSNMPKVKTIELEGGLLEDHFETTVKMSTYLVAYIVCDFHSLSGFTSSGVKVSIYASPDKRNQTHYALQASLKLLDFYEKYFDIYYPLSKLDLIAIPDFAPGAMENWGLITYRETSLLFDPKTSSASDKLWVTRVIAHELAHQWFGNLVTMEWWNDIWLKEGFAKYMELIAVNATYPELQFDDYFLNVCFEVITKDSLNSSRPISKPAETPTQIQEMFDEVSYNKGACILNMLKDFLGEEKFQKGIIQYLKKFSYRNAKNDDLWSSLSNSCLESDFTSGGVCHSDPKMTSNMVRIKRVTE

SEQ ID NO: 201 - protein, 350 aa, Homo sapiens
MFHSSAMVNSHRKPMFNIHRGFYCLTAILPQICICSQFSVPSSYHFTEDPGAFPVATNGERFPWQELRLPSVVIPLHYDLFVHPNLTSLDFVASEKIEVLVSNATQFIILHSKDLEITNATLQSEEDSRYMKPGKELKVLSYPAHEQIALLVPEKLTPHLKYYVAMDFQAKLGDGFEGFYKSTYRTLGGETRILAVTDFEPTQARMAFPCFDEPLFKANFSIKIRRESRHIALSNMPKVKTIELEGGLLEDHFETTVKMSTYLVAYIVCDFHSLSGFTSSGVKVSIYASPDKRNQTHYALQASLKLLDFYEKYFDIYYPLSKLGMFKFHIIVFIFAHKTCFDLFPLSLSM

SEQ ID NO: 202 - protein, 152 aa, Homo sapiens
MADSERLSAPGCWAACTNFSRTRKGILLFAEIILCLVILICFSASTPGYSSLSVIEMILAAIFFVVYMCDLHTKIPFINWPWSDFFRTLIAAILYLITSIVVLVERGNHSKIVAGVLGLIATCLFGYDAYVTFPVRQPRHTAAPTDPADGPV

SEQ ID NO: 203 - protein, 742 aa, Homo sapiens [sequence omitted]

SEQ ID NO: 204 - protein, 395 aa, Homo sapiens
MDKFWWHAAWGLCLVPLSLAQIDLNITCRFAGVFHVEKNGRYSISRTEAADLCKAFNSTLPTMAQMEKALSIGFETCRYGFIEGHVVIPRIHPNSICAANNTGVYILTSNTSQYDTYCFNASAPPEEDCTSVTDLPNAFDGPITITIVNRDGTRYVQKGEYRTNPEDIYPSNPTDDDVSSGSSSERSSTSGGYIFYTFSTVHPIPDEDSPWITDSTDRIPATNMDSSHSITLQPTANPNTGLVEDLDRTGPLSMTTRDQDTFHPSGGSHTTHGSESDGHSHGSQEGGANTTSGPIRTPQIPEWLIILASLLALALILAVCIAVNSRRRCGQKKKLVINSGNGAVEDRKPSGLNGEASKSQEMVHLVNKESSETPDQFMTADETRNLQNVDMKIGV

SEQ ID NO: 205 - protein, 493 aa, Homo sapiens
MDKFWWHAAWGLCLVPLSLAQIDLNITCRFAGVFHVEKNGRYSISRTEAADLCKAFNSTLPTMAQMEKALSIGFETCRYGFIEGHVVIPRIHPNSICAANNTGVYILTSNTSQYDTYCFNASAPPEEDCTSVTDLPNAFDGPITITIVNRDGTRYVQKGEYRTNPEDIYPSNPTDDDVSSGSSSERSSTSGGYIFYTFSTVHPIPDEDSPWITDSTDRIPATNMDSSHSITLQPTANPNTGLVEDLDRTGPLSMTTQQSNSQSFSTSHEGLEEDKDHPTTSTLTSSNRNDVTGGRRDPNHSEGSTTLLEGYTSHYPHTKESRTFIPVTSAKTGSFGVTAVTVGDSNSNVNRSLSGDQDTFHPSGGSHTTHGSESDGHSHGSQEGGANTTSGPIRTPQIPEWLIILASLLALALILAVCIAVNSRRRCGQKKKLVINSGNGAVEDRKPSGLNGEASKSQEMVHLVNKESSETPDQFMTADETRNLQNVDMKIGV

SEQ ID NO: 206 - protein, 361 aa, Homo sapiens
MDKFWWHAAWGLCLVPLSLAQIDLNITCRFAGVFHVEKNGRYSISRTEAADLCKAFNSTLPTMAQMEKALSIGFETCRYGFIEGHVVIPRIHPNSICAANNTGVYILTSNTSQYDTYCFNASAPPEEDCTSVTDLPNAFDGPITITIVNRDGTRYVQKGEYRTNPEDIYPSNPTDDDVSSGSSSERSSTSGGYIFYTFSTVHPIPDEDSPWITDSTDRIPATRDQDTFHPSGGSHTTHGSESDGHSHGSQEGGANTTSGPIRTPQIPEWLIILASLLALALILAVCIAVNSRRRCGQKKKLVINSGNGAVEDRKPSGLNGEASKSQEMVHLVNKESSETPDQFMTADETRNLQNVDMKIGV

SEQ ID NO: 207 - protein, 535 aa, Homo sapiens
MDKFWWHAAWGLCLVPLSLAQIDLNITCRFAGVFHVEKNGRYSISRTEAADLCKAFNSTLPTMAQMEKALSIGFETCRYGFIEGHVVIPRIHPNSICAANNTGVYILTSNTSQYDTYCFNASAPPEEDCTSVTDLPNAFDGPITITIVNRDGTRYVQKGEYRTNPEDIYPSNPTDDDVSSGSSSERSSTSGGYIFYTFSTVHPIPDEDSPWITDSTDRIPATSTSSNTISAGWEPNEENEDERDRHLSFSGSGIDDDEDFISSTNMDSSHSITLQPTANPNTGLVEDLDRTGPLSMTTQQSNSQSFSTSHEGLEEDKDHPTTSTLTSSNRNDVTGGRRDPNHSEGSTTLLEGYTSHYPHTKESRTFIPVTSAKTGSFGVTAVTVGDSNSNVNRSLSGDQDTFHPSGGSHTTHGSESDGHSHGSQEGGANTTSGPIRTPQIPEWLIILASLLALALILAVCIAVNSRRRCGQKKKLVINSGNGAVEDRKPSGLNGEASKSQEMVHLVNKESSETPDQFMTADETRNLQNVDMKIGV

SEQ ID NO: 208 - protein, 425 aa, Homo sapiens
MDKFWWHAAWGLCLVPLSLAQIDLNITCRFAGVFHVEKNGRYSISRTEAADLCKAFNSTLPTMAQMEKALSIGFETCRYGFIEGHVVIPRIHPNSICAANNTGVYILTSNTSQYDTYCFNASAPPEEDCTSVTDLPNAFDGPITITIVNRDGTRYVQKGEYRTNPEDIYPSNPTDDDVSSGSSSERSSTSGGYIFYTFSTVHPIPDEDSPWITDSTDRIPATNMDSSHSITLQPTANPNTGLVEDLDRTGPLSMTTQQSNSQSFSTSHEGLEEDKDHPTTSTLTSSRDQDTFHPSGGSHTTHGSESDGHSHGSQEGGANTTSGPIRTPQIPEWLIILASLLALALILAVCIAVNSRRRCGQKKKLVINSGNGAVEDRKPSGLNGEASKSQEMVHLVNKESSETPDQFMTADETRNLQNVDMKIGV

SEQ ID NO: 209 - protein, 691 aa, Homo sapiens
MDKFWWHAAWGLCLVPLSLAQIDLNITCRFAGVFHVEKNGRYSISRTEAADLCKAFNSTLPTMAQMEKALSIGFETCRYGFIEGHVVIPRIHPNSICAANNTGVYILTSNTSQYDTYCFNASAPPEEDCTSVTDLPNAFDGPITITIVNRDGTRYVQKGEYRTNPEDIYPSNPTDDDVSSGSSSERSSTSGGYIFYTFSTVHPIPDEDSPWITDSTDRIPATTLMSTSATATETATKRQETWDWFSWLFLPSESKNHLHTTTQMAAGWEPNEENEDERDRHLSFSGSGIDDDEDFISSTISTTPRAFDHTKQNQDWTQWNPSHSNPEVLLQTTTRMTDVDRNGTTAYEGNWNPEAHPPLIHHEHHEEEETPHSTSTTASAHTSHPMQGRTTPSPEDSSWTDFFNPISHPMGRGHQAGRRMDMDSSHSITLQPTANPNTGLVEDLDRTGPLSMTTQQSNSQSFSTSHEGLEEDKDHPTTSTLTSSNRNDVTGGRRDPNHSEGSTTLLEGYTSHYPHTKESRTFIPVTSAKTGSFGVTAVTVGDSNSNVNRSLSGDQDTFHPSGGSHTTHGSESDGHSHGSQEGGANTTSGPIRTPQIPEWLIILASLLALALILAVCIAVNSRRRCGQKKKLVINSGNGAVEDRKPSGLNGEASKSQEMVHLVNKESSETPDQFMTADETRNLQNVDMKIGV

SEQ ID NO: 210 - protein, 668 aa, Homo sapiens
MDKFWWHAAWGLCLVPLSLAQIDLNITCRFAGVFHVEKNGRYSISRTEAADLCKAFNSTLPTMAQMEKALSIGFETCRYGFIEGHVVIPRIHPNSICAANNTGVYILTSNTSQYDTYCFNASAPPEEDCTSVTDLPNAFDGPITITIVNRDGTRYVQKGEYRTNPEDIYPSNPTDDDVSSGSSSERSSTSGALMSTSATATETATKRQETWDWFSWLFLPSESKNHLHTTTQMAGTSSNTISAGWEPNEENEDERDRHLSFSGSGIDDDEDFISSTISTTPRAFDHTKQNQDWTQWNPSHSNPEVLLQTTTRMTDVDRNGTTAYEGNWNPEAHPPLIHHEHHEEEETPHSTSTTASAHTSHPMQGRTTPSPEDSSWTDFFNPISHPMGRGHQAGRRMDMDSSHSITLQPTANPNTGLVEDLDRTGPLSMTTQQSNSQSFSTSHEGLEEDKDHPTTSTLTSSNRNDVTGGRRDPNHSEGSTTLLEGYTSHYPHTKESRTFIPVTSAKTGSFGVTAVTVGDSNSNVNRSLSGDQDTFHPSGGSHTTHGSESDGHSHGSQEGGANTTSGPIRTPQIPEWLIILASLLALALILAVCIAVNSRRRCGQKKKLVINSGNGAVEDRKPSGLNGEASKSQEMVHLVNKESSETPDQFMTADETRNLQNVDMKIGV

SEQ ID NO: 211 - protein, 193 aa, Homo sapiens
MPEEGSGCSVRRRPYGCVLRAALVPLVAGLVICLVVCIQRFAQAQQQLPLESLGWDVAELQLNHTGPQQDPRLYWQGGPALGRSFLHGPELDKGQLRIHRDGIYMVHIQVTLAICSSTTASRHHPTTLAVGICSPASRSISLLRLSFHQGCTIASQRLTPLARGDTLCTNLTGTLLPSRNTDETFFGVQWVRP

SEQ ID NO: 212 - protein, 1822 aa, Homo sapiens
MAGPRPSPWARLLLAALISVSLSGTLANRCKKAPVKSCTECVRVDKDCAYCTDEMFRDRRCNTQAELLAAGCQRESIVVMESSFQITEETQIDTTLRRSQMSPQGLRVRLRPGEERHFELEVFEPLESPVDLYILMDFSNSMSDDLDNLKKMGQNLARVLSQLTSDYTIGFGKFVDKVSVPQTDMRPEKLKEPWPNSDPPFSFKNVISLTEDVDEFRNKLQGERISGNLDAPEGGFDAILQTAVCTRDIGWRPDSTHLLVFSTESAFHYEADGANVLAGIMSRNDERCHLDTTGTYTQYRTQDYPSVPTLVRLLAKHNIIPIFAVTNYSYSYYEKLHTYFPVSSLGVLQEDSSNIVELLEEAFNRIRSNLDIRALDSPRGLRTEVTSKMFQKTRTGSFHIRRGEVGIYQVQLRALEHVDGTHVCQLPEDQKGNIHLKPSFSDGLKMDAGIICDVCTCELQKEVRSARCSFNGDFVCGQCVCSEGWSGQTCNCSTGSLSDIQPCLREGEDKPCSGRGECQCGHCVCYGEGRYEGQFCEYDNFQCPRTSGFLCNDRGRCSMGQCVCEPGWTGPSCDCPLSNATCIDSNGGICNGRGHCECGRCHCHQQSLYTDTICEINYSAIHPGLCEDLRSCVQCQAWGTGEKKGRTCEECNFKVKMVDELKRAEEVVVRCSFRDEDDDCTYSYTMEGDGAPGPNSTVLVHKKKDCPPGSFWWLIPLLLLLLPLLALLLLLCWKYCACCKACLALLPCCNRGHMVGFKEDHYMLRENLMASDHLDTPMLRSGNLKGRDVVRWKVTNNMQRPGFATHAASINPTELVPYGLSLRLARLCTENLLKPDTRECAQLRQEVEENLNEVYRQISGVHKLQQTKFRQQPNAGKKQDHTIVDTVLMAPRSAKPALLKLTEKQVEQRAFHDLKVAPGYYTLTADQDARGMVEFQEGVELVDVRVPLFIRPEDDDEKQLLVEAIDVPAGTATLGRRLVNITIIKEQARDVVSFEQPEFSVSRGDQVARIPVIRRVLDGGKSQVSYRTQDGTAQGNRDYIPVEGELLFQPGEAWKELQVKLLELQEVDSLLRGRQVRRFHVQLSNPKFGAHLGQPHSTTIIIRDPDELDRSFTSQMLSSQPPPHGDLGAPQNPNAKAAGSRKIHFNWLPPSGKPMGYRVKYWIQGDSESEAHLLDSKVPSVELTNLYPYCDYEMKVCAYGAQGEGPYSSLVSCRTHQEVPSEPGRLAFNVVSSTVTQLSWAEPAETNGEITAYEVCYGLVNDDNRPIGPMKKVLVDNPKNRMLLIENLRESQPYRYTVKARNGAGWGPEREAIINLATQPKRPMSIPIIPDIPIVDAQSGEDYDSFLMYSDDVLRSPSGSQRPSVSDDTGCGWKFEPLLGEELDLRRVTWRLPPELIPRLSASSGRSSDAEAPHGPPDDGGAGGKGGSLPRSATPGPPGEHLVNGRMDFAFPGSTNSLHRMTTTSAAAYGTHLSPHVPHRVLSTSSTLTRDYNSLTRSEHSHSTTLPRDYSTLTSVSSHDSRLTAGVPDTPTRLVFSALGPTSLRVSWQEPRCERPLQGYSVEYQLLNGGELHRLNIPNPAQTSVVVEDLLPNHSYVFRVRAQSQEGWGREREGVITIESQVHPQSPLCPLPGSAFTLSTPSAPGPLVFTALSPDSLQLSWERPRRPNGDIVGYLVTCEMAQGGGPATAFRVDGDSPESRLTVPGLSENVPYKFKVQARTTEGFGPEREGIITIESQDGGPFPQLGSRAGLFQHPLQSEYSSITTTHTSATEPFLVDGLTLGAQHLEAGGSLTRHVTQEFVSRTLTTSGTLSTHMDQQFFQT

SEQ ID NO: 213 - protein, 1752 aa, Homo sapiens
MAGPRPSPWARLLLAALISVSLSGTLANRCKKAPVKSCTECVRVDKDCAYCTDEMFRDRRCNTQAELLAAGCQRESIVVMESSFQITEETQIDTTLRRSQMSPQGLRVRLRPGEERHFELEVFEPLESPVDLYILMDFSNSMSDDLDNLKKMGQNLARVLSQLTSDYTIGFGKFVDKVSVPQTDMRPEKLKEPWPNSDPPFSFKNVISLTEDVDEFRNKLQGERISGNLDAPEGGFDAILQTAVCTRDIGWRPDSTHLLVFSTESAFHYEADGANVLAGIMSRNDERCHLDTTGTYTQYRTQDYPSVPTLVRLLAKHNIIPIFAVTNYSYSYYEKLHTYFPVSSLGVLQEDSSNIVELLEEAFNRIRSNLDIRALDSPRGLRTEVTSKMFQKTRTGSFHIRRGEVGIYQVQLRALEHVDGTHVCQLPEDQKGNIHLKPSFSDGLKMDAGIICDVCTCELQKEVRSARCSFNGDFVCGQCVCSEGWSGQTCNCSTGSLSDIQPCLREGEDKPCSGRGECQCGHCVCYGEGRYEGQFCEYDNFQCPRTSGFLCNDRGRCSMGQCVCEPGWTGPSCDCPLSNATCIDSNGGICNGRGHCECGRCHCHQQSLYTDTICEINYSAIHPGLCEDLRSCVQCQAWGTGEKKGRTCEECNFKVKMVDELKRAEEVVVRCSFRDEDDDCTYSYTMEGDGAPGPNSTVLVHKKKDCPPGSFWWLIPLLLLLLPLLALLLLLCWKYCACCKACLALLPCCNRGHMVGFKEDHYMLRENLMASDHLDTPMLRSGNLKGRDVVRWKVTNNMQRPGFATHAASINPTELVPYGLSLRLARLCTENLLKPDTRECAQLRQEVEENLNEVYRQISGVHKLQQTKFRQQPNAGKKQDHTIVDTVLMAPRSAKPALLKLTEKQVEQRAFHDLKVAPGYYTLTADQDARGMVEFQEGVELVDVRVPLFIRPEDDDEKQLLVEAIDVPAGTATLGRRLVNITIIKEQARDVVSFEQPEFSVSRGDQVARIPVIRRVLDGGKSQVSYRTQDGTAQGNRDYIPVEGELLFQPGEAWKELQVKLLELQEVDSLLRGRQVRRFHVQLSNPKFGAHLGQPHSTTIIIRDPDELDRSFTSQMLSSQPPPHGDLGAPQNPNAKAAGSRKIHFNWLPPSGKPMGYRVKYWIQGDSESEAHLLDSKVPSVELTNLYPYCDYEMKVCAYGAQGEGPYSSLVSCRTHQEVPSEPGRLAFNVVSSTVTQLSWAEPAETNGEITAYEVCYGLVNDDNRPIGPMKKVLVDNPKNRMLLIENLRESQPYRYTVKARNGAGWGPEREAIINLATQPKRPMSIPIIPDIPIVDAQSGEDYDSFLMYSDDVLRSPSGSQRPSVSDDTEHLVNGRMDFAFPGSTNSLHRMTTTSAAAYGTHLSPHVPHRVLSTSSTLTRDYNSLTRSEHSHSTTLPRDYSTLTSVSSHDSRLTAGVPDTPTRLVFSALGPTSLRVSWQEPRCERPLQGYSVEYQLLNGGELHRLNIPNPAQTSVVVEDLLPNHSYVFRVRAQSQEGWGREREGVITIESQVHPQSPLCPLPGSAFTLSTPSAPGPLVFTALSPDSLQLSWERPRRPNGDIVGYLVTCEMAQGGGPATAFRVDGDSPESRLTVPGLSENVPYKFKVQARTTEGFGPEREGIITIESQDGGPFPQLGSRAGLFQHPLQSEYSSITTTHTSATEPFLVDGLTLGAQHLEAGGSLTRHVTQEFVSRTLTTSGTLSTHMDQQFFQT

SEQ ID NO: 214 - protein, 1875 aa, Homo sapiens
MAGPRPSPWARLLLAALISVSLSGTLANRCKKAPVKSCTECVRVDKDCAYCTDEMFRDRRCNTQAELLAAGCQRESIVVMESSFQITEETQIDTTLRRSQMSPQGLRVRLRPGEERHFELEVFEPLESPVDLYILMDFSNSMSDDLDNLKKMGQNLARVLSQLTSDYTIGFGKFVDKVSVPQTDMRPEKLKEPWPNSDPPFSFKNVISLTEDVDEFRNKLQGERISGNLDAPEGGFDAILQTAVCTRDIGWRPDSTHLLVFSTESAFHYEADGANVLAGIMSRNDERCHLDTTGTYTQYRTQDYPSVPTLVRLLAKHNIIPIFAVTNYSYSYYEKLHTYFPVSSLGVLQEDSSNIVELLEEAFNRIRSNLDIRALDSPRGLRTEVTSKMFQKTRTGSFHIRRGEVGIYQVQLRALEHVDGTHVCQLPEDQKGNIHLKPSFSDGLKMDAGIICDVCTCELQKEVRSARCSFNGDFVCGQCVCSEGWSGQTCNCSTGSLSDIQPCLREGEDKPCSGRGECQCGHCVCYGEGRYEGQFCEYDNFQCPRTSGFLCNDRGRCSMGQCVCEPGWTGPSCDCPLSNATCIDSNGGICNGRGHCECGRCHCHQQSLYTDTICEINYSAIHPGLCEDLRSCVQCQAWGTGEKKGRTCEECNFKVKMVDELKRAEEVVVRCSFRDEDDDCTYSYTMEGDGAPGPNSTVLVHKKKDCPPGSFWWLIPLLLLLLPLLALLLLLCWKYCACCKACLALLPCCNRGHMVGFKEDHYMLRENLMASDHLDTPMLRSGNLKGRDVVRWKVTNNMQRPGFATHAASINPTELVPYGLSLRLARLCTENLLKPDTRECAQLRQEVEENLNEVYRQISGVHKLQQTKFRQQPNAGKKQDHTIVDTVLMAPRSAKPALLKLTEKQVEQRAFHDLKVAPGYYTLTADQDARGMVEFQEGVELVDVRVPLFIRPEDDDEKQLLVEAIDVPAGTATLGRRLVNITIIKEQARDVVSFEQPEFSVSRGDQVARIPVIRRVLDGGKSQVSYRTQDGTAQGNRDYIPVEGELLFQPGEAWKELQVKLLELQEVDSLLRGRQVRRFHVQLSNPKFGAHLGQPHSTTIIIRDPDELDRSFTSQMLSSQPPPHGDLGAPQNPNAKAAGSRKIHFNWLPPSGKPMGYRVKYWIQGDSESEAHLLDSKVPSVELTNLYPYCDYEMKVCAYGAQGEGPYSSLVSCRTHQEVPSEPGRLAFNVVSSTVTQLSWAEPAETNGEITAYEVCYGLVNDDNRPIGPMKKVLVDNPKNRMLLIENLRESQPYRYTVKARNGAGWGPEREAIINLATQPKRPMSIPIIPDIPIVDAQSGEDYDSFLMYSDDVLRSPSGSQRPSVSDDTGCGWKFEPLLGEELDLRRVTWRLPPELIPRLSASSGRSSDAEAPHGPPDDGGAGGKGGSLPRSATPGPPGEHLVNGRMDFAFPGSTNSLHRMTTTSAAAYGTHLSPHVPHRVLSTSSTLTRDYNSLTRSEHSHSTTLPRDYSTLTSVSSHGLPPIWEHGRSRLPLSWALGSRSRAQMKGFPPSRGPRDSIILAGRPAAPSWGPDSRLTAGVPDTPTRLVFSALGPTSLRVSWQEPRCERPLQGYSVEYQLLNGGELHRLNIPNPAQTSVVVEDLLPNHSYVFRVRAQSQEGWGREREGVITIESQVHPQSPLCPLPGSAFTLSTPSAPGPLVFTALSPDSLQLSWERPRRPNGDIVGYLVTCEMAQGGGPATAFRVDGDSPESRLTVPGLSENVPYKFKVQARTTEGFGPEREGIITIESQDGGPFPQLGSRAGLFQHPLQSEYSSITTTHTSATEPFLVDGLTLGAQHLEAGGSLTRHVTQEFVSRTLTTSGTLSTHMDQQFFQT

SEQ ID NO: 215 - protein, 1702 aa, Homo sapiens
MAGPRPSPWARLLLAALISVSLSGTLANRCKKAPVKSCTECVRVDKDCAYCTDEMFRDRRCNTQAELLAAGCQRESIVVMESSFQITEETQIDTTLRRSQMSPQGLRVRLRPGEERHFELEVFEPLESPVDLYILMDFSNSMSDDLDNLKKMGQNLARVLSQLTSDYTIGFGKFVDKVSVPQTDMRPEKLKEPWPNSDPPFSFKNVISLTEDVDEFRNKLQGERISGNLDAPEGGFDAILQTAVCTRDIGWRPDSTHLLVFSTESAFHYEADGANVLAGIMSRNDERCHLDTTGTYTQYRTQDYPSVPTLVRLLAKHNIIPIFAVTNYSYSYYEKLHTYFPVSSLGVLQEDSSNIVELLEEAFNRIRSNLDIRALDSPRGLRTEVTSKMFQKTRTGSFHIRRGEVGIYQVQLRALEHVDGTHVCQLPEDQKGNIHLKPSFSDGLKMDAGIICDVCTCELQKEVRSARCSFNGDFVCGQCVCSEGWSGQTCNCSTGSLSDIQPCLREGEDKPCSGRGECQCGHCVCYGEGRYEGQFCEYDNFQCPRTSGFLCNDRGRCSMGQCVCEPGWTGPSCDCPLSNATCIDSNGGICNGRGHCECGRCHCHQQSLYTDTICEINYSAIHPGLCEDLRSCVQCQAWGTGEKKGRTCEECNFKVKMVDELKRAEEVVVRCSFRDEDDDCTYSYTMEGDGAPGPNSTVLVHKKKDCPPGSFWWLIPLLLLLLPLLALLLLLCWKYCACCKACLALLPCCNRGHMVGFKEDHYMLRENLMASDHLDTPMLRSGNLKGRDVVRWKVTNNMQRPGFATHAASINPTELVPYGLSLRLARLCTENLLKPDTRECAQLRQEVEENLNEVYRQISGVHKLQQTKFRQQPNAGKKQDHTIVDTVLMAPRSAKPALLKLTEKQVEQRAFHDLKVAPGYYTLTADQDARGMVEFQEGVELVDVRVPLFIRPEDDDEKQLLVEAIDVPAGTATLGRRLVNITIIKEQARDVVSFEQPEFSVSRGDQVARIPVIRRVLDGGKSQVSYRTQDGTAQGNRDYIPVEGELLFQPGEAWKELQVKLLELQEVDSLLRGRQVRRFHVQLSNPKFGAHLGQPHSTTIIIRDPDELDRSFTSQMLSSQPPPHGDLGAPQNPNAKAAGSRKIHFNWLPPSGKPMGYRVKYWIQGDSESEAHLLDSKVPSVELTNLYPYCDYEMKVCAYGAQGEGPYSSLVSCRTHQEVPSEPGRLAFNVVSSTVTQLSWAEPAETNGEITAYEVCYGLVNDDNRPIGPMKKVLVDNPKNRMLLIENLRESQPYRYTVKARNGAGWGPEREAIINLATQPKRPMSIPIIPDIPIVDAQSGEDYDSFLMYSDDVLRSPSGSQRPSVSDDTEHLVNGRMDFAFPGSTNSLHRMTTTSAAAYGTHLSPHVPHRVLSTSSTLTRDYNSLTRSEHSHSTTLPRDYSTLTSVSSHGELHRLNIPNPAQTSVVVEDLLPNHSYVFRVRAQSQEGWGREREGVITIESQVHPQSPLCPLPGSAFTLSTPSAPGPLVFTALSPDSLQLSWERPRRPNGDIVGYLVTCEMAQGGGPATAFRVDGDSPESRLTVPGLSENVPYKFKVQARTTEGFGPEREGIITIESQDGGPFPQLGSRAGLFQHPLQSEYSSITTTHTSATEPFLVDGLTLGAQHLEAGGSLTRHVTQEFVSRTLTTSGTLSTHMDQQFFQT

SEQ ID NO: 216 - protein, 1805 aa, Homo sapiens
MAGPRPSPWARLLLAALISVSLSGTLANRCKKAPVKSCTECVRVDKDCAYCTDEMFRDRRCNTQAELLAAGCQRESIVVMESSFQITEETQIDTTLRRSQMSPQGLRVRLRPGEERHFELEVFEPLESPVDLYILMDFSNSMSDDLDNLKKMGQNLARVLSQLTSDYTIGFGKFVDKVSVPQTDMRPEKLKEPWPNSDPPFSFKNVISLTEDVDEFRNKLQGERISGNLDAPEGGFDAILQTAVCTRDIGWRPDSTHLLVFSTESAFHYEADGANVLAGIMSRNDERCHLDTTGTYTQYRTQDYPSVPTLVRLLAKHNIIPIFAVTNYSYSYYEKLHTYFPVSSLGVLQEDSSNIVELLEEAFNRIRSNLDIRALDSPRGLRTEVTSKMFQKTRTGSFHIRRGEVGIYQVQLRALEHVDGTHVCQLPEDQKGNIHLKPSFSDGLKMDAGIICDVCTCELQKEVRSARCSFNGDFVCGQCVCSEGWSGQTCNCSTGSLSDIQPCLREGEDKPCSGRGECQCGHCVCYGEGRYEGQFCEYDNFQCPRTSGFLCNDRGRCSMGQCVCEPGWTGPSCDCPLSNATCIDSNGGICNGRGHCECGRCHCHQQSLYTDTICEINYSAIHPGLCEDLRSCVQCQAWGTGEKKGRTCEECNFKVKMVDELKRAEEVVVRCSFRDEDDDCTYSYTMEGDGAPGPNSTVLVHKKKDCPPGSFWWLIPLLLLLLPLLALLLLLCWKYCACCKACLALLPCCNRGHMVGFKEDHYMLRENLMASDHLDTPMLRSGNLKGRDVVRWKVTNNMQRPGFATHAASINPTELVPYGLSLRLARLCTENLLKPDTRECAQLRQEVEENLNEVYRQISGVHKLQQTKFRQQPNAGKKQDHTIVDTVLMAPRSAKPALLKLTEKQVEQRAFHDLKVAPGYYTLTADQDARGMVEFQEGVELVDVRVPLFIRPEDDDEKQLLVEAIDVPAGTATLGRRLVNITIIKEQARDVVSFEQPEFSVSRGDQVARIPVIRRVLDGGKSQVSYRTQDGTAQGNRDYIPVEGELLFQPGEAWKELQVKLLELQEVDSLLRGRQVRRFHVQLSNPKFGAHLGQPHSTTIIIRDPDELDRSFTSQMLSSQPPPHGDLGAPQNPNAKAAGSRKIHFNWLPPSGKPMGYRVKYWIQGDSESEAHLLDSKVPSVELTNLYPYCDYEMKVCAYGAQGEGPYSSLVSCRTHQEVPSEPGRLAFNVVSSTVTQLSWAEPAETNGEITAYEVCYGLVNDDNRPIGPMKKVLVDNPKNRMLLIENLRESQPYRYTVKARNGAGWGPEREAIINLATQPKRPMSIPIIPDIPIVDAQSGEDYDSFLMYSDDVLRSPSGSQRPSVSDDTEHLVNGRMDFAFPGSTNSLHRMTTTSAAAYGTHLSPHVPHRVLSTSSTLTRDYNSLTRSEHSHSTTLPRDYSTLTSVSSHGLPPIWEHGRSRLPLSWALGSRSRAQMKGFPPSRGPRDSIILAGRPAAPSWGPDSRLTAGVPDTPTRLVFSALGPTSLRVSWQEPRCERPLQGYSVEYQLLNGGELHRLNIPNPAQTSVVVEDLLPNHSYVFRVRAQSQEGWGREREGVITIESQVHPQSPLCPLPGSAFTLSTPSAPGPLVFTALSPDSLQLSWERPRRPNGDIVGYLVTCEMAQGGGPATAFRVDGDSPESRLTVPGLSENVPYKFKVQARTTEGFGPEREGIITIESQDGGPFPQLGSRAGLFQHPLQSEYSSITTTHTSATEPFLVDGLTLGAQHLEAGGSLTRHVTQEFVSRTLTTSGTLSTHMDQQFFQT

SEQ ID NO: 217 - protein, 269 aa, Homo sapiens
MGQNDLMGTAEDFADQFLRVTKQYLPHVARLCLISTFLEDGIRMWFQWSEQRDYIDTTWNCGYLLASSFVFLNLLGQLTGCVLVLSRNFVQYACFGLFGIIALQTIAYSILWDLKFLMRNLALGGGLLLLLAESRSEGKSMFAGVPTMRESSPKQYMQLGGRVLLVLMFMTLLHFDASFFSIVQNIVGTALMILVAIGFKTKLAALTLVVWLFAINVYFNAFWTIPVYKPMHDFLKYDFFQTMSVIGGLLLVVALGPGGVSMDEKKKEW

SEQ ID NO: 218 - protein, 325 aa, Homo sapiens
MGQNDLMGTAEDFADQFLRVTKQYLPHVARLCLISTFLEDGIRMWFQWSEQRDYIDTTWNCGYLLASSFVFLNLLGQLTGCVLVLSRNFVQYACFGLFGIIALQTIAYSILWDLKFLMRNLALGGGLLLLLAESRSEGKSMFAGVPTMRESSPKQYMQLGGRVLLVLMFMTLLHFDASFFSIVQNIVGTALMILVAIGFKTKLAALTLVVWLFAINVYFNAFWTIPVYKPMHDFLKYDFFQSLPAWLRPVAVKDWFGVDSTKLPAFMYPLPFPSLGKGTDVLRTLFAETPENRWLSLLWSHSLASDPSVQASLAAGSLPHAEALE

SEQ ID NO: 219 - protein, 155 aa, Homo sapiens
MRGLSAEAARGWKRILGAARFCGQSQWESKEGLSCSGCCSSWLSSAIQVSHSLQCYNCPNPTADCKTAVNCSSDFDACLITKAGLQVYNKCWKFEHCNFNDVTTRLRENELTYYCCKKDLCNFNEQLENGGTSLSEKTVLLLVTPFLAAAWSLHP

SEQ ID NO: 220 - protein, 128 aa, Homo sapiens
MGIQGGSVLFGLLLVLAVFCHSGHSLQCYNCPNPTADCKTAVNCSSDFDACLITKAGLQVYNKCWKFEHCNFNDVTTRLRENELTYYCCKKDLCNFNEQLENGGTSLSEKTVLLLVTPFLAAAWSLHP

SEQ ID NO: 221 - protein, 135 aa, Homo sapiens
MACGLVASNLNLKPGECLRVRGEVAPDAKSFVLNLGKDSNNLCLHFNPRFNAHGDANTIVCNSKDGGAWGTEQREAVFPFQPGSVAEVCITFDQANLTVKLPDGYEFKFPNRLNLEAINYMAADGDFKIKCVAFD

SEQ ID NO: 222 - protein, 375 aa, Homo sapiens
MDALQLANSAFAVDLFKQLCEKEPLGNVLFSPICLSTSLSLAQVGAKGDTANEIGQVLHFENVKDVPFGFQTVTSDVNKLSSFYSLKLIKRLYVDKSLNLSTEFISSTKRPYAKELETVDFKDKLEETKGQINNSIKDLTDGHFENILADNSVNDQTKILVVNAAYFVGKWMKKFSESETKECPFRVNKTDTKPVQMMNMEATFCMGNIDSINCKIIELPFQNKHLSMFILLPKDVEDESTGLEKIEKQLNSESLSQWTNPSTMANAKVKLSIPKFKVEKMIDPKACLENLGLKHIFSEDTSDFSGMSETKGVALSNVIHKVCLEITEDGGDSIEVPGARILQHKDELNADHPFIYIIRHNKTRNIIFFGKFCSP

SEQ ID NO: 223 - protein, 265 aa, Homo sapiens
MQRNWKLLTSKINWKKRKVRSTTQLRISQMASHFENILADNSVNDQTKILVVNAAYFVGKWMKKFSESETKECPFRVNKTDTKPVQMMNMEATFCMGNIDSINCKIIELPFQNKHLSMFILLPKDVEDESTGLEKIEKQLNSESLSQWTNPSTMANAKVKLSIPKFKVEKMIDPKACLENLGLKHIFSEDTSDFSGMSETKGVALSNVIHKVCLEITEDGGDSIEVPGARILQHKDELNADHPFIYIIRHNKTRNIIFFGKFCSP

SEQ ID NO: 224 - protein, 259 aa, Homo sapiens
MAPNIYLVRQRISRLGQRMSGFQINLNPLKEPLGFIKVLEWIASIFAFATCGGFKGQTEIQVNCPPAVTENKTVTATFGYPFRLNEASFQPPPGVNICDVNWKDYVLIGDYSSSAQFYVTFAVFVFLYCIAALLLYVGYTSLYLDSRKLPMIDFVVTLVATFLWLVSTSAWAKALTDIKIATGHNIIDELPPCKKKAVLCYFGSVTSMGSLNVSVIFGFLNMILWGGNAWFVYKETSLHSPSNTSAPHSQGGIPPPTGI

SEQ ID NO: 225 - protein, 241 aa, Homo sapiens
MSGFQINLNPLKEPLGFIKVLEWIASIFAFATCGGFKGQTEIQVNCPPAVTENKTVTATFGYPFRLNEASFQPPPGVNICDVNWKDYVLIGDYSSSAQFYVTFAVFVFLYCIAALLLYVGYTSLYLDSRKLPMIDFVVTLVATFLWLVSTSAWAKALTDIKIATGHNIIDELPPCKKKAVLCYFGSVTSMGSLNVSVIFGFLNMILWGGNAWFVYKETSLHSPSNTSAPHSQGGIPPPTGI

SEQ ID NO: 226 - protein, 526 aa, Homo sapiens
MRCALALSALLLLLSTPPLLPSSPSPSPSPSQNATQTTTDSSNKTAPTPASSVTIMATDTAQQSTVPTSKANEILASVKATTLGVSSDSPGTTTLAQQVSGPVNTTVARGGGSGNPTTTIESPKSTKSADTTTVATSTATAKPNTTSSQNGAEDTTNSGGKSSHSVTTDLTSTKAEHLTTPHPTSPLSPRQPTSTHPVATPTSSGHDHLMKISSSSSTVAIPGYTFTSPGMTTTLPSSVISQRTQQTSSQMPASSTAPSSQETVQPTSPATALRTPTLPETMSSSPTAASTTHRYPKTPSPTVAHESNWAKCEDLETQTQSEKQLVLNLTGNTLCAGGASDEKLISLICRAVKATFNPAQDKCGIRLASVPGSQTVVVKEITIHTKLPAKDVYERLKDKWDELKEAGVSDMKLGDQGPPEEAEDRFSMPLIITIVCMASFLLLVAALYGCCHQRLSQRKDQQRLTEELQTVENGYHDNPTLEVMETSSEMQEKKVVSLNGELGDSWIVPLDNLTKDDLDEEEDTHL

SEQ ID NO: 227 - protein, 528 aa, Homo sapiens
MRCALALSALLLLLSTPPLLPSSPSPSPSPSPSQNATQTTTDSSNKTAPTPASSVTIMATDTAQQSTVPTSKANEILASVKATTLGVSSDSPGTTTLAQQVSGPVNTTVARGGGSGNPTTTIESPKSTKSADTTTVATSTATAKPNTTSSQNGAEDTTNSGGKSSHSVTTDLTSTKAEHLTTPHPTSPLSPRQPTLTHPVATPTSSGHDHLMKISSSSSTVAIPGYTFTSPGMTTTLPSSVISQRTQQTSSQMPASSTAPSSQETVQPTSPATALRTPTLPETMSSSPTAASTTHRYPKTPSPTVAHESNWAKCEDLETQTQSEKQLVLNLTGNTLCAGGASDEKLISLICRAVKATFNPAQDKCGIRLASVPGSQTVVVKEITIHTKLPAKDVYERLKDKWDELKEAGVSDMKLGDQGPPEEAEDRFSMPLIITIVCMASFLLLVAALYGCCHQRLSQRKDQQRLTEELQTVENGYHDNPTLEVMETSSEMQEKKVVSLNGELGDSWIVPLDNLTKDDLDEEEDTHL

SEQ ID NO: 228 - protein, 115 aa, Homo sapiens
MPMFIVNTNVPRASVPDGFLSELTQQLAQATGKPPQYIAVHVVPDQLMAFGGSSEPCALCSLHSIGKIGGAQNRSYSKLLCGLLAERLRISPDRVYINYYDMNAANVGWNNSTFA

SEQ ID NO: 229 - protein, 574 aa, Homo sapiens [sequence omitted]

SEQ ID NO: 230 - protein, 574 aa, Homo sapiens
MCPRAARAPATLLLALGAVLWPAAGAWELTILHTNDVHSRLEQTSEDSSKCVNASRCMGGVARLFTKVQQIRRAEPNVLLLDAGDQYQGTIWFTVYKGAEVAHFMNALRYDAMALGNHEFDNGVEGLIEPLLKEAKFPILSANIKAKGPLASQISGLYLPYKVLPVGDEVVGIVGYTSKETPFLSNPGTNLVFEDEITALQPEVDKLKTLNVNKIIALGHSGFEMDKLIAQKVRGVDVVVGGHSNTFLYTGNPPSKEVPAGKYPFIVTSDDGRKVPVVQAYAFGKYLGYLKIEFDERGNVISSHGNPILLNSSIPEDPSIKADINKWRIKLDNYSTQELGKTIVYLDGSSQSCRFRECNMGNLICDAMINNNLRHTDEMFWNHVSMCILNGGGIRSPIDERNNGTITWENLAAVLPFGGTFDLVQLKGSTLKKAFEHSVHRYGQSTGEFLQVGGIHVVYDLSRKPGDRVVKLDVLCTKCRVPSYDPLKMDEVYKVILPNFLANGGDGFQMIKDELLRHDSGDQDINVVSTYISKMKVIYPAVEGRIKFSTGSHCHGSFSLIFLSLWAVIFVLYQ

SEQ ID NO: 231 - protein, 238 aa, Homo sapiens
MAVEGGMKCVKFLLYVLLLAFCACAVGLIAVGVGAQLVLSQTIIQGATPGSLLPVVIIAVGVFLFLVAFVGCCGACKENYCLMITFAIFLSLIMLVEVAAAIAGYVFRDKVMSEFNNNFRQQMENYPKNNHTASILDRMQADFKCCGAANYTDWEKIPSMSKNRVPDSCCINVTVGCGINFNEKAIHKEGCVEKIGGWLRKNVLVVAAAALGIAFVEVLGIVFACCLVKSIRSGYEVM

SEQ ID NO: 232 - protein, 1205 aa, Homo sapiens
MTNPSDRVLPANSMAESREGDFGCTVMELRKLMELRSRDALTQINVHYGGVQNLCSRLKTSPVEGLSGNPADLEKRRQVFGHNVIPPKKPKTFLELVWEALQDVTLIILEIAAIISLVLSFYRPAGEENELCGQVATTPEDENEAQAGWIEGAAILFSVIIVVLVTAFNDWSKEKQFRGLQCRIEQEQKFSIIRNGQLIQLPVAEIVVGDIAQVKYGDLLPADGILIQGNDLKIDESSLTGESDHVKKSLDKDPMLLSGTHVMEGSGRMVVTAVGVNSQTGIILTLLGVNEDDEGEKKKKGKKQGVPENRNKAKTQDGVALEIQPLNSQEGIDNEEKDKKAVKVPKKEKSVLQGKLTRLAVQIGKAGLLMSALTVFILILYFVIDNFVINRRPWLPECTPIYIQYFVKFFIIGITVLVVAVPEGLPLAVTISLAYSVKKMMKDNNLVRHLDACETMGNATAICSDKTGTLTMNRMTVVQAYIGGIHYRQIPSPDVFLPKVLDLIVNGISINSAYTSKILPPEKEGGLPRQVGNKTECALLGFVTDLKQDYQAVRNEVPEEKLYKVYTFNSVRKSMSTVIRNPNGGFRMYSKGASEIILRKCNRILDRKGEAVPFKNKDRDDMVRTVIEPMACDGLRTICIAYRDFDDTEPSWDNENEILTELTCIAVVGIEDPVRPEVPDAIAKCKQAGITVRMVTGDNINTARAIATKCGILTPGDDFLCLEGKEFNRLIRNEKGEVEQEKLDKIWPKLRVLARSSPTDKHTLVKGIIDSTVGEHRQVVAVTGDGTNDGPALKKADVGFAMGIAGTDVAKEASDIILTDDNFTSIVKAVMWGRNVYDSISKFLQFQLTVNVVAVIVAFTGACITQDSPLKAVQMLWVNLIMDTFASLALATEPPTESLLKRRPYGRNKPLISRTMMKNILGHAFYQLIVIFILVFAGEKFFDIDSGRKAPLHSPPSQHYTIVFNTFVLMQLFNEINSRKIHGEKNVFSGIYRNIIFCSVVLGTFICQIFIVEFGGKPFSCTSLSLSQWLWCLFIGIGELLWGQFISAIPTRSLKFLKEAGHGTTKEEITKDAEGLDEIDHAEMELRRGQILWFRGLNRIQTQIKVVKAFHSSLHESIQKPYNQKSIHSFMTHPEFAIEEELPRTPLLDEEEEENPDKASKFGTRVLLLDGEVTPYANTNNNAVDCNQVQLPQSDSSLQSLETSV

SEQ ID NO: 233 - protein, 1170 aa, Homo sapiens
MTNPSDRVLPANSMAESREGDFGCTVMELRKLMELRSRDALTQINVHYGGVQNLCSRLKTSPVEGLSGNPADLEKRRQVFGHNVIPPKKPKTFLELVWEALQDVTLIILEIAAIISLVLSFYRPAGEENELCGQVATTPEDENEAQAGWIEGAAILFSVIIVVLVTAFNDWSKEKQFRGLQCRIEQEQKFSIIRNGQLIQLPVAEIVVGDIAQVKYGDLLPADGILIQGNDLKIDESSLTGESDHVKKSLDKDPMLLSGTHVMEGSGRMVVTAVGVNSQTGIILTLLGVNEDDEGEKKKKGKKQGVPENRNKAKTQDGVALEIQPLNSQEGIDNEEKDKKAVKVPKKEKSVLQGKLTRLAVQIGKAGLLMSALTVFILILYFVIDNFVINRRPWLPECTPIYIQYFVKFFIIGITVLVVAVPEGLPLAVTISLAYSVKKMMKDNNLVRHLDACETMGNATAICSDKTGTLTMNRMTVVQAYIGGIHYRQIPSPDVFLPKVLDLIVNGISINSAYTSKILPPEKEGGLPRQVGNKTECALLGFVTDLKQDYQAVRNEVPEEKLYKVYTFNSVRKSMSTVIRNPNGGFRMYSKGASEIILRKCNRILDRKGEAVPFKNKDRDDMVRTVIEPMACDGLRTICIAYRDFDDTEPSWDNENEILTELTCIAVVGIEDPVRPEVPDAIAKCKQAGITVRMVTGDNINTARAIATKCGILTPGDDFLCLEGKEFNRLIRNEKGEVEQEKLDKIWPKLRVLARSSPTDKHTLVKGIIDSTVGEHRQVVAVTGDGTNDGPALKKADVGFAMGIAGTDVAKEASDIILTDDNFTSIVKAVMWGRNVYDSISKFLQFQLTVNVVAVIVAFTGACITQDSPLKAVQMLWVNLIMDTFASLALATEPPTESLLKRRPYGRNKPLISRTMMKNILGHAFYQLIVIFILVFAGEKFFDIDSGRKAPLHSPPSQHYTIVFNTFVLMQLFNEINSRKIHGEKNVFSGIYRNIIFCSVVLGTFICQIFIVEFGGKPFSCTSLSLSQWLWCLFIGIGELLWGQFISAIPTRSLKFLKEAGHGTTKEEITKDAEGLDEIDHAEMELRRGQILWFRGLNRIQTQIDVINTFQTGASFKGVLRRQNMGQHLDVKLVPSSSYVAVAPVKSSPTTSVPAVSSPPMGNQSGQSVP

SEQ ID NO: 234 - protein, 1241 aa, Homo sapiens
MTNPSDRVLPANSMAESREGDFGCTVMELRKLMELRSRDALTQINVHYGGVQNLCSRLKTSPVEGLSGNPADLEKRRQVFGHNVIPPKKPKTFLELVWEALQDVTLIILEIAAIISLVLSFYRPAGEENELCGQVATTPEDENEAQAGWIEGAAILFSVIIVVLVTAFNDWSKEKQFRGLQCRIEQEQKFSIIRNGQLIQLPVAEIVVGDIAQVKYGDLLPADGILIQGNDLKIDESSLTGESDHVKKSLDKDPMLLSGTHVMEGSGRMVVTAVGVNSQTGIILTLLGVNEDDEGEKKKKGKKQGVPENRNKAKTQDGVALEIQPLNSQEGIDNEEKDKKAVKVPKKEKSVLQGKLTRLAVQIGKAGLLMSALTVFILILYFVIDNFVINRRPWLPECTPIYIQYFVKFFIIGITVLVVAVPEGLPLAVTISLAYSVKKMMKDNNLVRHLDACETMGNATAICSDKTGTLTMNRMTVVQAYIGGIHYRQIPSPDVFLPKVLDLIVNGISINSAYTSKILPPEKEGGLPRQVGNKTECALLGFVTDLKQDYQAVRNEVPEEKLYKVYTFNSVRKSMSTVIRNPNGGFRMYSKGASEIILRKCNRILDRKGEAVPFKNKDRDDMVRTVIEPMACDGLRTICIAYRDFDDTEPSWDNENEILTELTCIAVVGIEDPVRPEVPDAIAKCKQAGITVRMVTGDNINTARAIATKCGILTPGDDFLCLEGKEFNRLIRNEKGEVEQEKLDKIWPKLRVLARSSPTDKHTLVKGIIDSTVGEHRQVVAVTGDGTNDGPALKKADVGFAMGIAGTDVAKEASDIILTDDNFTSIVKAVMWGRNVYDSISKFLQFQLTVNVVAVIVAFTGACITQDSPLKAVQMLWVNLIMDTFASLALATEPPTESLLKRRPYGRNKPLISRTMMKNILGHAFYQLIVIFILVFAGEKFFDIDSGRKAPLHSPPSQHYTIVFNTFVLMQLFNEINSRKIHGEKNVFSGIYRNIIFCSVVLGTFICQIFIVEFGGKPFSCTSLSLSQWLWCLFIGIGELLWGQFISAIPTRSLKFLKEAGHGTTKEEITKDAEGLDEIDHAEMELRRGQILWFRGLNRIQTQIDVINTFQTGASFKGVLRRQNMGQHLDVKLVPSSSYIKVVKAFHSSLHESIQKPYNQKSIHSFMTHPEFAIEEELPRTPLLDEEEEENPDKASKFGTRVLLLDGEVTPYANTNNNAVDCNQVQLPQSDSSLQSLETSV

SEQ ID NO: 235 - protein, 1159 aa, Homo sapiens
MGDMANSSIEFHPKPQQQRDVPQAGGFGCTLAELRTLMELRGAEALQKIEEAYGDVSGLCRRLKTSPTEGLADNTNDLEKRRQIYGQNFIPPKQPKTFLQLVWEALQDVTLIILEVAAIVSLGLSFYAPPGEESEACGNVSGGAEDEGEAEAGWIEGAAILLSVICVVLVTAFNDWSKEKQFRGLQSRIEQEQKFTVIRNGQLLQVPVAALVVGDIAQVKYGDLLPADGVLIQANDLKIDESSLTGESDHVRKSADKDPMLLSGTHVMEGSGRMVVTAVGVNSQTGIIFTLLGAGGEEEEKKDKKAKKQDGAVAMEMQPLKSAEGGEMEEREKKKANAPKKEKSVLQGKLTKLAVQIGKAGLVMSAITVIILVLYFVIETFVVEGRTWLAECTPVYVQYFVKFFIIGVTVLVVAVPEGLPLAVTISLAYSVKKMMKDNNLVRHLDACETMGNATAICSDKTGTLTTNRMTVVQSYLGDTHYKEIPAPSALTPKILDLLVHAISINSAYTTKILPPEKEGALPRQVGNKTECALLGFVLDLKRDFQPVREQIPEDKLYKVYTFNSVRKSMSTVIRMPDGGFRLFSKGASEILLKKCTNILNSNGELRGFRPRDRDDMVRKIIEPMACDGLRTICIAYRDFSAGQEPDWDNENEVVGDLTCIAVVGIEDPVRPEVPEAIRKCQRAGITVRMVTGDNINTARAIAAKCGIIQPGEDFLCLEGKEFNRRIRNEKGEIEQERLDKVWPKLRVLARSSPTDKHTLVKGIIDSTTGEQRQVVAVTGDGTNDGPALKKADVGFAMGIAGTDVAKEASDIILTDDNFTSIVKAVMWGRNVYDSISKFLQFQLTVNVVAVIVAFTGACITQDSPLKAVQMLWVNLIMDTFASLALATEPPTESLLLRKPYGRDKPLISRTMMKNILGHAVYQLAIIFTLLFVGELFFDIDSGRNAPLHSPPSEHYTIIFNTFVMMQLFNEINARKIHGERNVFDGIFSNPIFCTIVLGTFGIQIVIVQFGGKPFSCSPLSTEQWLWCLFVGVGELVWGQVIATIPTSQLKCLKEAGHGPGKDEMTDEELAEGEEEIDHAERELRRGQILWFRGLNRIQTQMEVVSTFKRSGSVQGAVRRRSSVLSQLHDVTNLSTPTHAILSAANPTSAAGNPGGESVP

SEQ ID NO: 236 - protein, 1173 aa, Homo sapiens
MGDMANSSIEFHPKPQQQRDVPQAGGFGCTLAELRTLMELRGAEALQKIEEAYGDVSGLCRRLKTSPTEGLADNTNDLEKRRQIYGQNFIPPKQPKTFLQLVWEALQDVTLIILEVAAIVSLGLSFYAPPGEESEACGNVSGGAEDEGEAEAGWIEGAAILLSVICVVLVTAFNDWSKEKQFRGLQSRIEQEQKFTVIRNGQLLQVPVAALVVGDIAQVKYGDLLPADGVLIQANDLKIDESSLTGESDHVRKSADKDPMLLSGTHVMEGSGRMVVTAVGVNSQTGIIFTLLGAGGEEEEKKDKKGKQQDGAMESSQTKAKKQDGAVAMEMQPLKSAEGGEMEEREKKKANAPKKEKSVLQGKLTKLAVQIGKAGLVMSAITVIILVLYFVIETFVVEGRTWLAECTPVYVQYFVKFFIIGVTVLVVAVPEGLPLAVTISLAYSVKKMMKDNNLVRHLDACETMGNATAICSDKTGTLTTNRMTVVQSYLGDTHYKEIPAPSALTPKILDLLVHAISINSAYTTKILPPEKEGALPRQVGNKTECALLGFVLDLKRDFQPVREQIPEDKLYKVYTFNSVRKSMSTVIRMPDGGFRLFSKGASEILLKKCTNILNSNGELRGFRPRDRDDMVRKIIEPMACDGLRTICIAYRDFSAGQEPDWDNENEVVGDLTCIAVVGIEDPVRPEVPEAIRKCQRAGITVRMVTGDNINTARAIAAKCGIIQPGEDFLCLEGKEFNRRIRNEKGEIEQERLDKVWPKLRVLARSSPTDKHTLVKGIIDSTTGEQRQVVAVTGDGTNDGPALKKADVGFAMGIAGTDVAKEASDIILTDDNFTSIVKAVMWGRNVYDSISKFLQFQLTVNVVAVIVAFTGACITQDSPLKAVQMLWVNLIMDTFASLALATEPPTESLLLRKPYGRDKPLISRTMMKNILGHAVYQLAIIFTLLFVGELFFDIDSGRNAPLHSPPSEHYTIIFNTFVMMQLFNEINARKIHGERNVFDGIFSNPIFCTIVLGTFGIQIVIVQFGGKPFSCSPLSTEQWLWCLFVGVGELVWGQVIATIPTSQLKCLKEAGHGPGKDEMTDEELAEGEEEIDHAERELRRGQILWFRGLNRIQTQMEVVSTFKRSGSVQGAVRRRSSVLSQLHDVTNLSTPTHAILSAANPTSAAGNPGGESVP

SEQ ID NO: 237 - protein, 1220 aa, Homo sapiens
MGDMANSSIEFHPKPQQQRDVPQAGGFGCTLAELRTLMELRGAEALQKIEEAYGDVSGLCRRLKTSPTEGLADNTNDLEKRRQIYGQNFIPPKQPKTFLQLVWEALQDVTLIILEVAAIVSLGLSFYAPPGEESEACGNVSGGAEDEGEAEAGWIEGAAILLSVICVVLVTAFNDWSKEKQFRGLQSRIEQEQKFTVIRNGQLLQVPVAALVVGDIAQVKYGDLLPADGVLIQANDLKIDESSLTGESDHVRKSADKDPMLLSGTHVMEGSGRMVVTAVGVNSQTGIIFTLLGAGGEEEEKKDKKGKQQDGAMESSQTKAKKQDGAVAMEMQPLKSAEGGEMEEREKKKANAPKKEKSVLQGKLTKLAVQIGKAGLVMSAITVIILVLYFVIETFVVEGRTWLAECTPVYVQYFVKFFIIGVTVLVVAVPEGLPLAVTISLAYSVKKMMKDNNLVRHLDACETMGNATAICSDKTGTLTTNRMTVVQSYLGDTHYKEIPAPSALTPKILDLLVHAISINSAYTTKILPPEKEGALPRQVGNKTECALLGFVLDLKRDFQPVREQIPEDKLYKVYTFNSVRKSMSTVIRMPDGGFRLFSKGASEILLKKCTNILNSNGELRGFRPRDRDDMVRKIIEPMACDGLRTICIAYRDFSAGQEPDWDNENEVVGDLTCIAVVGIEDPVRPEVPEAIRKCQRAGITVRMVTGDNINTARAIAAKCGIIQPGEDFLCLEGKEFNRRIRNEKGEIEQERLDKVWPKLRVLARSSPTDKHTLVKGIIDSTTGEQRQVVAVTGDGTNDGPALKKADVGFAMGIAGTDVAKEASDIILTDDNFTSIVKAVMWGRNVYDSISKFLQFQLTVNVVAVIVAFTGACITQDSPLKAVQMLWVNLIMDTFASLALATEPPTESLLLRKPYGRDKPLISRTMMKNILGHAVYQLAIIFTLLFVGELFFDIDSGRNAPLHSPPSEHYTIIFNTFVMMQLFNEINARKIHGERNVFDGIFSNPIFCTIVLGTFGIQIVIVQFGGKPFSCSPLSTEQWLWCLFVGVGELVWGQVIATIPTSQLKCLKEAGHGPGKDEMTDEELAEGEEEIDHAERELRRGQILWFRGLNRIQTQIRVVKAFRSSLYEGLEKPESKTSIHNFMATPEFLINDYTHNIPLIDDTDVDENEERLRAPPPPSPNQNNNAIDSGIYLTTHVTKSATSSVFSSSPGSPLHSVETSL

SEQ ID NO: 238 - protein, 977 aa, Homo sapiens [sequence omitted]

SEQ ID NO: 239 - protein, 429 aa, Homo sapiens
MLPRLLLLICAPLCEPAELFLIASPSHPTEGSPVTLTCKMPFLQSSDAQFQFCFFRDTRALGPGWSSSPKLQIAAMWKEDTGSYWCEAQTMASKVLRSRRSQINVHRVPVADVSLETQPPGGQVMEGDRLVLICSVAMGTGDITFLWYKGAVGLNLQSKTQRSLTAEYEIPSVRESDAEQYYCVAENGYGPSPSGLVSITVRIPVSRPILMLRAPRAQAAVEDVLELHCEALRGSPPILYWFYHEDITLGSRSAPSGGGASFNLSLTEEHSGNYSCEANNGLGAQRSEAVTLNFTVPTGARSNHLTSGVIEGLLSTLGPATVALLFCYGLKRKIGRRSARDPLRSLPSPLPQEFTYLNSPTPGQLQPIYENVNVVSGDEVYSLAYYNQPEQESVAAETLGTHMEDKVSLDIYSRLRKANITDVDYEDAM

SEQ ID NO: 240 - protein, 759 aa, Homo sapiens [sequence omitted]

SEQ ID NO: 241 - protein, 592 aa, Homo sapiens [sequence omitted]

SEQ ID NO: 242 - protein, 987 aa, Homo sapiens
MELRVLLCWASLAAALEETLLNTKLETADLKWVTFPQVDGQWEELSGLDEEQHSVRTYEVCDVQRAPGQAHWLRTGWVPRRGAVHVYATLRFTMLECLSLPRAGRSCKETFTVFYYESDADTATALTPAWMENPYIKVDTVAAEHLTRKRPGAEATGKVNVKTLRLGPLSKAGFYLAFQDQGACMALLSLHLFYKKCAQLTVNLTRFPETVPRELVVPVAGSCVVDAVPAPGPSPSLYCREDGQWAEQPVTGCSCAPGFEAAEGNTKCRACAQGTFKPLSGEGSCQPCPANSHSNTIGSAVCQCRVGYFRARTDPRGAPCTTPPSAPRSVVSRLNGSSLHLEWSAPLESGGREDLTYALRCRECRPGGSCAPCGGDLTFDPGPRDLVEPWVVVRGLRPDFTYTFEVTALNGVSSLATGPVPFEPVNVTTDREVPPAVSDIRVTRSSPSSLSLAWAVPRAPSGAVLDYEVKYHEKGAEGPSSVRFLKTSENRAELRGLKRGASYLVQVRARSEAGYGPFGQEHHSQTQLDESEGWREQLALIAGTAVVGVVLVLVVIVVAVLCLRKQSNGREAEYSDKHGQYLIGHGTKVYIDPFTYEDPNEAVREFAKEIDVSYVKIEEVIGAGEFGEVCRGRLKAPGKKESCVAIKTLKGGYTERQRREFLSEASIMGQFEHPNIIRLEGVVTNSMPVMILTEFMENGALDSFLRLNDGQFTVIQLVGMLRGIASGMRYLAEMSYVHRDLAARNILVNSNLVCKVSDFGLSRFLEENSSDPTYTSSLGGKIPIRWTAPEAIAFRKFTSASDAWSYGIVMWEVMSFGERPYWDMSNQDVINAIEQDYRLPPPPDCPTSLHQLMLDCWQKDRNARPRFPQVVSALDKMIRNPASLKIVARENGGASHPLLDQRQPHYSAFGSVGEWLRAIKMGRYEESFAAAGFGSFELVSQISAEDLLRIGVTLAGHQKKILASVQHMKSQAKPGTPGGTGGPAPQY

SEQ ID NO: 243 - protein, 984 aa, Homo sapiens
MALDYLLLLLLASAVAAMEETLMDTRTATAELGWTANPASGWEEVSGYDENLNTIRTYQVCNVFEPNQNNWLLTTFINRRGAHRIYTEMRFTVRDCSSLPNVPGSCKETFNLYYYETDSVIATKKSAFWSEAPYLKVDTIAADESFSQVDFGGRLMKVNTEVRSFGPLTRNGFYLAFQDYGACMSLLSVRVFFKKCPSIVQNFAVFPETMTGAESTSLVIARGTCIPNAEEVDVPIKLYCNGDGEWMVPIGRCTCKPGYEPENSVACKACPAGTFKASQEAEGCSHCPSNSRSPAEASPICTCRTGYYRADFDPPEVACTSVPSGPRNVISIVNETSIILEWHPPRETGGRDDVTYNIICKKCRADRRSCSRCDDNVEFVPRQLGLTECRVSISSLWAHTPYTFDIQAINGVSSKSPFPPQHVSVNITTNQAAPSTVPIMHQVSATMRSITLSWPQPEQPNGIILDYEIRYYEKEHNEFNSSMARSQTNTARIDGLRPGMVYVVQVRARTVAGYGKFSGKMCFQTLTDDDYKSELREQLPLIAGSAAAGVVFVVSLVAISIVCSRKRAYSKEAVYSDKLQHYSTGRGSPGMKIYIDPFTYEDPNEAVREFAKEIDVSFVKIEEVIGAGEFGEVYKGRLKLPGKREIYVAIKTLKAGYSEKQRRDFLSEASIMGQFDHPNIIRLEGVVTKSRPVMIITEFMENGALDSFLRQNDGQFTVIQLVGMLRGIAAGMKYLAEMNYVHRDLAARNILVNSNLVCKVSDFGLSRYLQDDTSDPTYTSSLGGKIPVRWTAPEAIAYRKFTSASDVWSYGIVMWEVMSFGERPYWDMSNQDVINAIEQDYRLPPPMDCPAALHQLMLDCWQKDRNSRPRFAEIVNTLDKMIRNPASLKTVATITAVPSQPLLDRSIPDFTAFTTVDDWLSAIKMVQYRDSFLTAGFTSLQLVTQMTSEDLLRIGITLAGHQKKILNSIHSMRVQISQSPTAMA

SEQ ID NO: 244 - protein, 976 aa, Homo sapiens
MELQAARACFALLWGCALAAAAAAQGKEVVLLDFAAAGGELGWLTHPYGKGWDLMQNIMNDMPIYMYSVCNVMSGDQDNWLRTNWVYRGEAERIFIELKFTVRDCNSFPGGASSCKETFNLYYAESDLDYGTNFQKRLFTKIDTIAPDEITVSSDFEARHVKLNVEERSVGPLTRKGFYLAFQDIGACVALLSVRVYYKKCPELLQGLAHFPETIAGSDAPSLATVAGTCVDHAVVPPGGEEPRMHCAVDGEWLVPIGQCLCQAGYEKVEDACQACSPGFFKFEASESPCLECPEHTLPSPEGATSCECEEGFFRAPQDPASMPCTRPPSAPHYLTAVGMGAKVELRWTPPQDSGGREDIVYSVTCEQCWPESGECGPCEASVRYSEPPHGLTRTSVTVSDLEPHMNYTFTVEARNGVSGLVTSRSFRTASVSINQTEPPKVRLEGRSTTSLSVSWSIPPPQQSRVWKYEVTYRKKGDSNSYNVRRTEGFSVTLDDLAPDTTYLVQVQALTQEGQGAGSKVHEFQTLSPEGSGNLAVIGGVAVGVVLLLVLAGVGFFIHRRRKNQRARQSPEDVYFSKSEQLKPLKTYVDPHTYEDPNQAVLKFTTEIHPSCVTRQKVIGAGEFGEVYKGMLKTSSGKKEVPVAIKTLKAGYTEKQRVDFLGEAGIMGQFSHHNIIRLEGVISKYKPMMIITEYMENGALDKFLREKDGEFSVLQLVGMLRGIAAGMKYLANMNYVHRDLAARNILVNSNLVCKVSDFGLSRVLEDDPEATYTTSGGKIPIRWTAPEAISYRKFTSASDVWSFGIVMWEVMTYGERPYWELSNHEVMKAINDGFRLPTPMDCPSAIYQLMMQCWQQERARRPKFADIVSILDKLIRAPDSLKTLADFDPRVSIRLPSTSGSEGVPFRTVSEWLESIKMQQYTEHFMAAGYTAIEKVVQMTNDDIKRIGVRLPGHQKRIAYSLLGLKDQVNTVGIPI

SEQ ID NO: 245 - protein, 1000 aa, Homo sapiens
MALRRLGAALLLLPLLAAVEETLMDSTTATAELGWMVHPPSGWEEVSGYDENMNTIRTYQVCNVFESSQNNWLRTKFIRRRGAHRIHVEMKFSVRDCSSIPSVPGSCKETFNLYYYEADFDSATKTFPNWMENPWVKVDTIAADESFSQVDLGGRVMKINTEVRSFGPVSRSGFYLAFQDYGGCMSLIAVRVFYRKCPRIIQNGAIFQETLSGAESTSLVAARGSCIANAEEVDVPIKLYCNGDGEWLVPIGRCMCKAGFEAVENGTVCRGCPSGTFKANQGDEACTHCPINSRTTSEGATNCVCRNGYYRADLDPLDMPCTTIPSAPQAVISSVNETSLMLEWTPPRDSGGREDLVYNIICKSCGSGRGACTRCGDNVQYAPRQLGLTEPRIYISDLLAHTQYTFEIQAVNGVTDQSPFSPQFASVNITTNQAAPSAVSIMHQVSRTVDSITLSWSQPDQPNGVILDYELQYYEKELSEYNATAIKSPTNTVTVQGLKAGAIYVFQVRARTVAGYGRYSGKMYFQTMTEAEYQTSIQEKLPLIIGSSAAGLVFLIAVVVIAIVCNRRRGFERADSEYTDKLQHYTSGHSMYTPKRAGTLGPFTVGSPIYIDPFTYEDPNEAVREFAKEIDISCVKIEQVIGAGEFGEVCSGHLKLPGKREIFVAIKTLKSGYTEKQRRDFLSEASIMGQFDHPNVIHLEGVVTKSTPVMIITEFMENGSLDSFLRQNDGQFTVIQLVGMLRGIAAGMKYLADMNYVHRDLAARNILVNSNLVCKVSDFGLSRFLEDDTSDPTYTSALGGKIPIRWTAPEAIQYRKFTSASDVWSYGIVMWEVMSYGERPYWDMTNQDVINAIEQDYRLPPPMDCPSALHQLMLDCWQKDRNHRPKFGQIVNTLDKMIRNPNSLKAMAPLSSGINLPLLDRTIPDYTSFNTVDEWLEAIKMGQYKESFANAGFTSFDVVSQMMMEDILRVGVTLAGHQKKILNSIQVMRAQMNQIQSVEV

SEQ ID NO: 246 - protein, 998 aa, Homo sapiens
MVFQTRYPSWIILCYIWLLRFAHTGEAQAAKEVLLLDSKAQQTELEWISSPPNGWEEISGLDENYTPIRTYQVCQVMEPNQNNWLRTNWISKGNAQRIFVELKFTLRDCNSLPGVLGTCKETFNLYYYETDYDTGRNIRENLYVKIDTIAADESFTQGDLGERKMKLNTEVREIGPLSKKGFYLAFQDVGACIALVSVKVYYKKCWSIIENLAIFPDTVTGSEFSSLVEVRGTCVSSAEEEAENAPRMHCSAEGEWLVPIGKCICKAGYQQKGDTCEPCGRGFYKSSSQDLQCSRCPTHSFSDKEGSSRCECEDGYYRAPSDPPYVACTRPPSAPQNLIFNINQTTVSLEWSPPADNGGRNDVTYRILCKRCSWEQGECVPCGSNIGYMPQQTGLEDNYVTVMDLLAHANYTFEVEAVNGVSDLSRSQRLFAAVSITTGQAAPSQVSGVMKERVLQRSVELSWQEPEHPNGVITEYEIKYYEKDQRERTYSTVKTKSTSASINNLKPGTVYVFQIRAFTAAGYGNYSPRLDVATLEEATGKMFEATAVSSEQNPVIIIAVVAVAGTIILVFMVFGFIIGRRHCGYSKADQEGDEELYFHFKFPGTKTYIDPETYEDPNRAVHQFAKELDASCIKIERVIGAGEFGEVCSGRLKLPGKRDVAVAIKTLKVGYTEKQRRDFLCEASIMGQFDHPNVVHLEGVVTRGKPVMIVIEFMENGALDAFLRKHDGQFTVIQLVGMLRGIAAGMRYLADMGYVHRDLAARNILVNSNLVCKVSDFGLSRVIEDDPEAVYTTTGGKIPVRWTAPEAIQYRKFTSASDVWSYGIVMWEVMSYGERPYWDMSNQDVIKAIEEGYRLPAPMDCPAGLHQLMLDCWQKERAERPKFEQIVGILDKMIRNPNSLKTPLGTCSRPISPLLDQNTPDFTTFCSVGEWLQAIKMERYKDNFTAAGYNSLESVARMTIEDVMSLGITLVGHQKKIMSSIQTMRAQMLHLHGTGIQV

SEQ ID NO: 247 - protein, 986 aa, Homo sapiens
MAGIFYFALFSCLFGICDAVTGSRVYPANEVTLLDSRSVQGELGWIASPLEGGWEEVSIMDEKNTPIRTYQVCNVMEPSQNNWLRTDWITREGAQRVYIEIKFTLRDCNSLPGVMGTCKETFNLYYYESDNDKERFIRENQFVKIDTIAADESFTQVDIGDRIMKLNTEIRDVGPLSKKGFYLAFQDVGACIALVSVRVFYKKCPLTVRNLAQFPDTITGADTSSLVEVRGSCVNNSEEKDVPKMYCGADGEWLVPIGNCLCNAGHEERSGECQACKIGYYKALSTDATCAKCPPHSYSVWEGATSCTCDRGFFRADNDAASMPCTRPPSAPLNLISNVNETSVNLEWSSPQNTGGRQDISYNVVCKKCGAGDPSKCRPCGSGVHYTPQQNGLKTTKVSITDLLAHTNYTFEIWAVNGVSKYNPNPDQSVSVTVTTNQAAPSSIALVQAKEVTRYSVALAWLEPDRPNGVILEYEVKYYEKDQNERSYRIVRTAARNTDIKGLNPLTSYVFHVRARTAAGYGDFSEPLEVTTNTVPSRIIGDGANSTVLLVSVSGSVVLVVILIAAFVISRRRSKYSKAKQEADEEKHLNQGVRTYVDPFTYEDPNQAVREFAKEIDASCIKIEKVIGVGEFGEVCSGRLKVPGKREICVAIKTLKAGYTDKQRRDFLSEASIMGQFDHPNIIHLEGVVTKCKPVMIITEYMENGSLDAFLRKNDGRFTVIQLVGMLRGIGSGMKYLSDMSYVHRDLAARNILVNSNLVCKVSDFGMSRVLEDDPEAAYTTRGGKIPIRWTAPEAIAYRKFTSASDVWSYGIVMWEVMSYGERPYWDMSNQDVIKAIEEGYRLPPPMDCPIALHQLMLDCWQKERSDRPKFGQIVNMLDKLIRNPNSLKRTGTESSRPNTALLDPSSPEFSAVVSVGDWLQAIKMDRYKDNFTAAGYTTLEAVVHVNQEDLARIGITAITHQNKILSSVQAMRTQMQQMHGRMVPV

SEQ ID NO: 248 - protein, 956 aa, Homo sapiens
MDTKWVTSELAWTSHPESGWEEVSGYDEAMNPIRTYQVCNVRESSQNNWLRTGFIWRRDVQRVYVELKFTVRDCNSIPNIPGSCKETFNLFYYEADSDVASASSPFWMENPYVKVDTIAPDESFSRLDAGRVNTKVRSFGPLSKAGFYLAFQDQGACMSLISVRAFYKKCASTTAGFALFPETLTGAEPTSLVIAPGTCIPNAVEVSVPLKLYCNGDGEWMVPVGACTCATGHEPAAKESQCRPCPPGSYKAKQGEGPCLPCPPNSRTTSPAASICTCHNNFYRADSDSADSACTTVPSPPRGVISNVNETSLILEWSEPRDLGGRDDLLYNVICKKCHGAGGASACSRCDDNVEFVPRQLGLTERRVHISHLLAHTRYTFEVQAVNGVSGKSPLPPRYAAVNITTNQAAPSEVPTLRLHSSSGSSLTLSWAPPERPNGVILDYEMKYFEKSEGIASTVTSQMNSVQLDGLRPDARYVVQVRARTVAGYGQYSRPAEFETTSERGSGAQQLQEQLPLIVGSATAGLVFVVAVVVIAIVCLRKQRHGSDSEYTEKLQQYIAPGMKVYIDPFTYEDPNEAVREFAKEIDVSCVKIEEVIGAGEFGEVCRGRLKQPGRREVFVAIKTLKVGYTERQRRDFLSEASIMGQFDHPNIIRLEGVVTKSRPVMILTEFMENCALDSFLRLNDGQFTVIQLVGMLRGIAAGMKYLSEMNYVHRDLAARNILVNSNLVCKVSDFGLSRFLEDDPSDPTYTSSLGGKIPIRWTAPEAIAYRKFTSASDVWSYGIVMWEVMSYGERPYWDMSNQDVINAVEQDYRLPPPMDCPTALHQLMLDCWVRDRNLRPKFSQIVNTLDKLIRNAASLKVIASAQSGMSQPLLDRTVPDYTTFTTVGDWLDAIKMGRYKESFVSAGFASFDLVAQMTAEDLLRIGVTLAGHQKKILSSIQDMRLQMNQTLPVQV

SEQ ID NO: 249 - protein, 993 aa, Homo sapiens
MVFQTRYPSWIILCYIWLLRFAHTGEAQAAKEVLLLDSKAQQTELEWISSPPNGWEEISGLDENYTPIRTYQVCQVMEPNQNNWLRTNWISKGNAQRIFVELKFTLRDCNSLPGVLGTCKETFNLYYYETDYDTGRNIRENLYVKIDTIAADESFTQGDLGERKMKLNTEVREIGPLSKKGFYLAFQDVGACIALVSVKVYYKKCWSIIENLAIFPDTVTGSEFSSLVEVRGTCVSSAEEEAENAPRMHCSAEGEWLVPIGKCICKAGYQQKGDTCEPCGRGFYKSSSQDLQCSRCPTHSFSDKEGSSRCECEDGYYRAPSDPPYVACTRPPSAPQNLIFNINQTTVSLEWSPPADNGGRNDVTYRILCKRCSWEQGECVPCGSNIGYMPQQTGLEDNYVTVMDLLAHANYTFEVEAVNGVSDLSRSQRLFAAVSITTGQAAPSQVSGVMKERVLQRSVELSWQEPEHPNGVITEYEIKYYEKDQRERTYSTVKTKSTSASINNLKPGTVYVFQIRAFTAAGYGNYSPRLDVATLEEATATAVSSEQNPVIIIAVVAVAGTIILVFMVFGFIIGRRHCGYSKADQEGDEELYFHFKFPGTKTYIDPETYEDPNRAVHQFAKELDASCIKIERVIGAGEFGEVCSGRLKLPGKRDVAVAIKTLKVGYTEKQRRDFLCEASIMGQFDHPNVVHLEGVVTRGKPVMIVIEFMENGALDAFLRKHDGQFTVIQLVGMLRGIAAGMRYLADMGYVHRDLAARNILVNSNLVCKVSDFGLSRVIEDDPEAVYTTTGGKIPVRWTAPEAIQYRKFTSASDVWSYGIVMWEVMSYGERPYWDMSNQDVIKAIEEGYRLPAPMDCPAGLHQLMLDCWQKERAERPKFEQIVGILDKMIRNPNSLKTPLGTCSRPISPLLDQNTPDFTTFCSVGEWLQAIKMERYKDNFTAAGYNSLESVARMTIEDVMSLGITLVGHQKKIMSSIQTMRAQMLHLHGTGIQV

SEQ ID NO: 250 - protein, 935 aa, Homo sapiens
MELRVLLCWASLAAALEETLLNTKLETADLKWVTFPQVDGQWEELSGLDEEQHSVRTYEVCDVQRAPGQAHWLRTGWVPRRGAVHVYATLRFTMLECLSLPRAGRSCKETFTVFYYESDADTATALTPAWMENPYIKVDTVAAEHLTRKRPGAEATGKVNVKTLRLGPLSKAGFYLAFQDQGACMALLSLHLFYKKCAQLTVNLTRFPETVPRELVVPVAGSCVVDAVPAPGPSPSLYCREDGQWAEQPVTGCSCAPGFEAAEGNTKCRACAQGTFKPLSGEGSCQPCPANSHSNTIGSAVCQCRVGYFRARTDPRGAPCTTPPSAPRSVVSRLNGSSLHLEWSAPLESGGREDLTYALRCRECRPGGSCAPCGGDLTFDPGPRDLVEPWVVVRGLRPDFTYTFEVTALNGVSSLATGPVPFEPVNVTTDREVPPAVSDIRVTRSSPSSLSLAWAVPRAPSGAVLDYEVKYHEKGAEGPSSVRFLKTSENRAELRGLKRGASYLVQVRARSEAGYGPFGQEHHSQTQLDESEGWREQLALIAGTAVVGVVLVLVVIVVAVLCLRKQSNGREAEYSDKHGQYLIGHGTKVYIDPFTYEDPNEAVREFAKEIDVSYVKIEEVIGAGEFGEVCRGRLKAPGKKESCVAIKTLKGGYTERQRREFLSEASIMGQFEHPNIIRLEGVVTNSMPVMILTEFMENGALDSFLRLNDGQFTVIQLVGMLRGIASGMRYLAEMSYVHRDLAARNILVNSNLVCKVSDFGLSRFLEENSSDPTYTSSLGGKIPIRWTAPEAIAFRKFTSASDAWSYGIVMWEVMSFGERPYWDMSNQDVINAIEQDYRLPPPPDCPTSLHQLMLDCWQKDRNARPRFPQVVSALDKMIRNPASLKIVARENGGDLLRIGVTLAGHQKKILASVQHMKSQAKPGTPGGTGGPAPQY

SEQ ID NO: 251 - protein, 962 aa, Homo sapiens
MDTRTATAELGWTANPASGWEEVSGYDENLNTIRTYQVCNVFEPNQNNWLLTTFINRRGAHRIYTEMRFTVRDCSSLPNVPGSCKETFNLYYYETDSVIATKKSAFWSEAPYLKVDTIAADESFSQVDFGGRLMKVNTEVRSFGPLTRNGFYLAFQDYGACMSLLSVRVFFKKCPSIVQNFAVFPETMTGAESTSLVIARGTCIPNAEEVDVPIKLYCNGDGEWMVPIGRCTCKPGYEPENSVACKACPAGTFKASQEAEGCSHCPSNSRSPAEASPICTCRTGYYRADFDPPEVACTSVPSGPRNVISIVNETSIILEWHPPRETGGRDDVTYNIICKKCRADRRSCSRCDDNVEFVPRQLGLTECRVSISSLWAHTPYTFDIQAINGVSSKSPFPPQHVSVNITTNQAAPSTVPIMHQVSATMRSITLSWPQPEQPNGIILDYEIRYYEKEHNEFNSSMARSQTNTARIDGLRPGMVYVVQVRARTVAGYGKFSGKMCFQTLTDDDYKSELREQLPLIAGSAAAGVVFVVSLVAISIVCSRKRAYSKEAVYSDKLQHYSTGRGSPGMKIYIDPFTYEDPNEAVREFAKEIDVSFVKIEEVIGAGEFGEVYKGRLKLPGKREIYVAIKTLKAGYSEKQRRDFLSEASIMGQFDHPNIIRLEGVVTKSRPVMIITEFMENGALDSFLRQNDGQFTVIQLVGMLRGIAAGMKYLAEMNYVHRDLAARNILVNSNLVCKVSDFGLSRYLQDDTSDPTYTSSLGGKIPVRWTAPEAIAYRKFTSASDVWSYGIVMWEVMSFGERPYWDMSNQDVINAIEQDYRLPPPMDCPAALHQLMLDCWQKDRNSRPRFAEIVNTLDKMIRNPASLKTVATITAVPSQPLLDRSIPDFTAFTTVDDWLSAIKMVQYRDSFLTAGFTSLQLVTQMTSEDLLRIGITLAGHQKKILNSIHSMRVQISQSPTAMA

SEQ ID NO: 252 - protein, 987 aa, Homo sapiens [sequence omitted]

SEQ ID NO: 253 - protein, 334 aa, Homo sapiens
MKDSPFQVTKLYWLNEKWDFIASASDMAAEQGQILVIATAAVGGFTLLVILTLFFLITGRCQWYIKAKMKSEEKRRNHLQNGHLRFPGIKTYIDPDTYEDPSLAVHEFAKEIDPSRIRIERVIGAGEFGEVCSGRLKTPGKREIPVAIKTLKGGHMDRQRRDFLREASIMGQFDHPNIIRLEGVVTKRSFPAIGVEAFCPSFLRAGFLNSIQAPHPVPGGGSLPPRIPAGRPVMIVVEYMENGSLDSFLRKHDGHFTVIQLVGMLRGIASGMKYLSDMGYVHRDLAARNILVNSNLVCKVSDFGLSRVLEDDPEAAYTTTDLFQTLTLNLCYSA

SEQ ID NO: 254 - protein, 1055 aa, Homo sapiens
MALRRLGAALLLLPLLAAVEETLMDSTTATAELGWMVHPPSGWEEVSGYDENMNTIRTYQVCNVFESSQNNWLRTKFIRRRGAHRIHVEMKFSVRDCSSIPSVPGSCKETFNLYYYEADFDSATKTFPNWMENPWVKVDTIAADESFSQVDLGGRVMKINTEVRSFGPVSRSGFYLAFQDYGGCMSLIAVRVFYRKCPRIIQNGAIFQETLSGAESTSLVAARGSCIANAEEVDVPIKLYCNGDGEWLVPIGRCMCKAGFEAVENGTVCRGCPSGTFKANQGDEACTHCPINSRTTSEGATNCVCRNGYYRADLDPLDMPCTTIPSAPQAVISSVNETSLMLEWTPPRDSGGREDLVYNIICKSCGSGRGACTRCGDNVQYAPRQLGLTEPRIYISDLLAHTQYTFEIQAVNGVTDQSPFSPQFASVNITTNQAAPSAVSIMHQVSRTVDSITLSWSQPDQPNGVILDYELQYYEKELSEYNATAIKSPTNTVTVQGLKAGAIYVFQVRARTVAGYGRYSGKMYFQTMTEAEYQTSIQEKLPLIIGSSAAGLVFLIAVVVIAIVCNRRGFERADSEYTDKLQHYTSGHMTPGMKIYIDPFTYEDPNEAVREFAKEIDISCVKIEQVIGAGEFGEVCSGHLKLPGKREIFVAIKTLKSGYTEKQRRDFLSEASIMGQFDHPNVIHLEGVVTKSTPVMIITEFMENGSLDSFLRQNDGQFTVIQLVGMLRGIAAGMKYLADMNYVHRDLAARNILVNSNLVCKVSDFGLSRFLEDDTSDPTYTSALGGKIPIRWTAPEAIQYRKFTSASDVWSYGIVMWEVMSYGERPYWDMTNQDVINAIEQDYRLPPPMDCPSALHQLMLDCWQKDRNHRPKFGQIVNTLDKMIRNPNSLKAMAPLSSGINLPLLDRTIPDYTSFNTVDEWLEAIKMGQYKESFANAGFTSFDVVSQMMMEDILRVGVTLAGHQKKILNSIQVMRAQMNQIQSVEGQPLARRPRATGRTKRCQPRDVTKKTCNSNDGKKKGMGKKKTDPGRGREIQGIFFKEDSHKESNDCSCGG

SEQ ID NO: 255 - protein, 987 aa, Homo sapiens
MALRRLGAALLLLPLLAAVEETLMDSTTATAELGWMVHPPSGWEEVSGYDENMNTIRTYQVCNVFESSQNNWLRTKFIRRRGAHRIHVEMKFSVRDCSSIPSVPGSCKETFNLYYYEADFDSATKTFPNWMENPWVKVDTIAADESFSQVDLGGRVMKINTEVRSFGPVSRSGFYLAFQDYGGCMSLIAVRVFYRKCPRIIQNGAIFQETLSGAESTSLVAARGSCIANAEEVDVPIKLYCNGDGEWLVPIGRCMCKAGFEAVENGTVCRGCPSGTFKANQGDEACTHCPINSRTTSEGATNCVCRNGYYRADLDPLDMPCTTIPSAPQAVISSVNETSLMLEWTPPRDSGGREDLVYNIICKSCGSGRGACTRCGDNVQYAPRQLGLTEPRIYISDLLAHTQYTFEIQAVNGVTDQSPFSPQFASVNITTNQAAPSAVSIMHQVSRTVDSITLSWSQPDQPNGVILDYELQYYEKELSEYNATAIKSPTNTVTVQGLKAGAIYVFQVRARTVAGYGRYSGKMYFQTMTEAEYQTSIQEKLPLIIGSSAAGLVFLIAVVVIAIVCNRRRGFERADSEYTDKLQHYTSGHMTPGMKIYIDPFTYEDPNEAVREFAKEIDISCVKIEQVIGAGEFGEVCSGHLKLPGKREIFVAIKTLKSGYTEKQRRDFLSEASIMGQFDHPNVIHLEGVVTKSTPVMIITEFMENGSLDSFLRQNDGQFTVIQLVGMLRGIAAGMKYLADMNYVHRDLAARNILVNSNLVCKVSDFGLSRFLEDDTSDPTYTSALGGKIPIRWTAPEAIQYRKFTSASDVWSYGIVMWEVMSYGERPYWDMTNQDVINAIEQDYRLPPPMDCPSALHQLMLDCWQKDRNHRPKFGQIVNTLDKMIRNPNSLKAMAPLSSGINLPLLDRTIPDYTSFNTVDEWLEAIKMGQYKESFANAGFTSFDVVSQMMMEDILRVGVTLAGHQKKILNSIQVMRAQMNQIQSVEV

SEQ ID NO: 256 - protein, 1056 aa, Homo sapiens
MALRRLGAALLLLPLLAAVEETLMDSTTATAELGWMVHPPSGWEEVSGYDENMNTIRTYQVCNVFESSQNNWLRTKFIRRRGAHRIHVEMKFSVRDCSSIPSVPGSCKETFNLYYYEADFDSATKTFPNWMENPWVKVDTIAADESFSQVDLGGRVMKINTEVRSFGPVSRSGFYLAFQDYGGCMSLIAVRVFYRKCPRIIQNGAIFQETLSGAESTSLVAARGSCIANAEEVDVPIKLYCNGDGEWLVPIGRCMCKAGFEAVENGTVCRGCPSGTFKANQGDEACTHCPINSRTTSEGATNCVCRNGYYRADLDPLDMPCTTIPSAPQAVISSVNETSLMLEWTPPRDSGGREDLVYNIICKSCGSGRGACTRCGDNVQYAPRQLGLTEPRIYISDLLAHTQYTFEIQAVNGVTDQSPFSPQFASVNITTNQAAPSAVSIMHQVSRTVDSITLSWSQPDQPNGVILDYELQYYEKELSEYNATAIKSPTNTVTVQGLKAGAIYVFQVRARTVAGYGRYSGKMYFQTMTEAEYQTSIQEKLPLIIGSSAAGLVFLIAVVVIAIVCNRRRGFERADSEYTDKLQHYTSGHMTPGMKIYIDPFTYEDPNEAVREFAKEIDISCVKIEQVIGAGEFGEVCSGHLKLPGKREIFVAIKTLKSGYTEKQRRDFLSEASIMGQFDHPNVIHLEGVVTKSTPVMIITEFMENGSLDSFLRQNDGQFTVIQLVGMLRGIAAGMKYLADMNYVHRDLAARNILVNSNLVCKVSDFGLSRFLEDDTSDPTYTSALGGKIPIRWTAPEAIQYRKFTSASDVWSYGIVMWEVMSYGERPYWDMTNQDVINAIEQDYRLPPPMDCPSALHQLMLDCWQKDRNHRPKFGQIVNTLDKMIRNPNSLKAMAPLSSGINLPLLDRTIPDYTSFNTVDEWLEAIKMGQYKESFANAGFTSFDVVSQMMMEDILRVGVTLAGHQKKILNSIQVMRAQMNQIQSVEGQPLARRPRATGRTKRCQPRDVTKKTCNSNDGKKKGMGKKKTDPGRGREIQGIFFKEDSHKESNDCSCGG

SEQ ID NO: 257 - protein, 1139 aa, Homo sapiens [sequence omitted]

SEQ ID NO: 258 - protein, 1097 aa, Homo sapiens [sequence omitted]

SEQ ID NO: 259 - protein, 1769 aa, Homo sapiens
MILPNSPPNRTDEKKKTKKVDNELNPVWNEILEFDLRGIPLDFSSSLGIIVKDFETIGQNKLIGTATVALKDLTGDQSRSLPYKLISLLNEKGQDTGATIDLVIGYDPPSAPHPNDLSGPSVPGMGGDGEEDEGDEDRLDNAVRGPGPKGPVGTVSEAQLARRLTKVKNSRRMLSNKPQDFQIRVRVIEGRQLSGNNIRPVVKVHVCGQTHRTRIKRGNNPFFDELFFYNVNMTPSELMDEIISIRVYNSHSLRADCLMGEFKIDVGFVYDEPGHAVMRKWLLLNDPEDTSSGSKGYMKVSMFVLGTGDEPPPERRDRDNDSDDVESNLLLPAGIALRWVTFLLKIYRAEDIPQMDDAFSQTVKEIFGGNADKKNLVDPFVEVSFAGKKVCTNIIEKNANPEWNQVVNLQIKFPSVCEKIKLTIYDWDRLTKNDVVGTTYLHLSKIAASGGEVEVNTGETEVGFVPTFGPCYLNLYGSPREYTGFPDPYDELNTGKGEGVAYRGRILVELATFLEKTPPDKKLEPISNDDLLVVEKYQRRRKYSLSAVFHSATMLQDVGEAIQFEVSIGNYGNKFDTTCKPLASTTQYSRAVFDGNYYYYLPWAHTKPVVTLTSYWEDISHRLDAVNTLLAMAERLQTNIEALKSGIQGKIPANQLAELWLKLIDEVIEDTRYTLPLTEGKANVTVLDTQIRKLRSRSLSQIHEAAVRMRSEATDVKSTLAEIEDWLDKLMQLTEEPQNSMPDIIIWMIRGEKRLAYARIPAHQVLYSTSGENASGKYCGKTQTIFLKYPQEKNNGPKVPVELRVNIWLGLSAVEKKFNSFAEGTFTVFAEMYENQALMFGKWGTSGLVGRHKFSDVTGKIKLKREFFLPPKGWEWEGEWIVDPERSLLTEADAGHTEFTDEVYQNESRYPGGDWKPAEDTYTDANGDKAASPSELTCPPGWEWEDDAWSYDINRAVDEKGWEYGITIPPDHKPKSWVAAEKMYHTHRRRRLVRKRKKDLTQTASSTARAMEELQDQEGWEYASLIGWKFHWKQRSSDTFRRRRWRRKMAPSETHGAAAIFKLEGALGADTTEDGDEKSLEKQKHSATTVFGANTPIVSCNFDRVYIYHLRCYVYQARNLLALDKDSFSDPYAHICFLHRSKTTEIIHSTLNPTWDQTIIFDEVEIYGEPQTVLQNPPKVIMELFDNDQVGKDEFLGRSIFSPVVKLNSEMDITPKLLWHPVMNGDKACGDVLVTAELILRGKDGSNLPILPPQRAPNLYMVPQGIRPVVQLTAIEILAWGLRNMKNFQMASITSPSLVVECGGERVESVVIKNLKKTPNFPSSVLFMKVFLPKEELYMPPLVIKVIDHRQFGRKPVVGQCTIERLDRFRCDPYAGKEDIVPQLKASLLSAPPCRDIVIEMEDTKPLLASKCLSSMSTALSKMASPATVHLTEKEEEIVDWWSKFYASSGEHEKCGQYIQKGYSKLKIYNCELENVAEFEGLTDFSDTFKLYRGKSDENEDPSVVGEFKGSFRIYPLPDDPSVPAPPRQFRELPDSVPQECTVRIYIVRGLELQPQDNNGLCDPYIKITLGKKVIEDRDHYIPNTLNPVFGRMYELSCYLPQEKDLKISVYDYDTFTRDEKVGETIIDLENRFLSRFGSHCGIPEEYCVSGVNTWRDQLRPTQLLQNVARFKGFPQPILSEDGSRIRYGGRDYSLDEFEANKILHQHLGAPEERLALHILRTQGLVPEHVETRTLHSTFQPNIILPACDHLEHQGRYLGREKHHRRGNE

SEQ ID NO: 260 - protein, 2057 aa, Homo sapiens
MLRVIVESASNIPKTKFGKPDPIVSVIFKDEKKKTKKVDNELNPVWNEILEFDLRGIPLDFSSSLGIIVKDFETIGQNKLIGTATVALKDLTGDQSRSLPYKLISLLNEKGQDTGATIDLVIGYDPPSAPHPNDLSGPSVPGMGGDGEEDEGDEDRLDNAVRGPGPKGPVGTVSEAQLARRLTKVKNSRRMLSNKPQDFQIRVRVIEGRQLSGNNIRPVVKVHVCGQTHRTRIKRGNNPFFDELFFYNVNMTPSELMDEIISIRVYNSHSLRADCLMGEFKIDVGFVYDEPGHAVMRKWLLLNDPEDTSSGSKGYMKVSMFVLGTGDEPPPERRDRDNDSDDVESNLLLPAGIALRWVTFLLKIYRAEDIPQMDDAFSQTVKEIFGGNADKKNLVDPFVEVSFAGKKVCTNIIEKNANPEWNQVVNLQIKFPSVCEKIKLTIYDWDRLTKNDVVGTTYLHLSKIAASGGEVEDFSSSGTGAASYTVNTGETEVGFVPTFGPCYLNLYGSPREYTGFPDPYDELNTGKGEGVAYRGRILVELATFLEKTPPDKKLEPISNDDLLVVEKYQRRRKYSLSAVFHSATMLQDVGEAIQFEVSIGNYGNKFDTTCKPLASTTQYSRAVFDGNYYYYLPWAHTKPVVTLTSYWEDISHRLDAVNTLLAMAERLQTNIEALKSGIQGKIPANQLAELWLKLIDEVIEDTRYTLPLTEGKANVTVLDTQIRKLRSRSLSQIHEAAVRMRSEATDVKSTLAEIEDWLDKLMQLTEEPQNSMPDIIIWMIRGEKRLAYARIPAHQVLYSTSGENASGKYCGKTQTIFLKYPQEKNNGPKVPVELRVNIWLGLSAVEKKFNSFAEGTFTVFAEMYENQALMFGKWGTSGLVGRHKFSDVTGKIKLKREFFLPPKGWEWEGEWIVDPERSLLTEADAGHTEFTDEVYQNESRYPGGDWKPAEDTYTDANGDKAASPSELTCPPGWEWEDDAWSYDINRAVDEKGWEYGITIPPDHKPKSWVAAEKMYHTHRRRRLVRKRKKDLTQTASSTARAMEELQDQEGWEYASLIGWKFHWKQRSSDTFRRRRWRRKMAPSETHGAAAIFKLEGALGADTTEDGDEKSLEKQKHSATTVFGANTPIVSCNFDRVYIYHLRCYVYQARNLLALDKDSFSDPYAHICFLHRSKTTEIIHSTLNPTWDQTIIFDEVEIYGEPQTVLQNPPKVIMELFDNDQVGKDEFLGRSIFSPVVKLNSEMDITPKLLWHPVMNGDKACGDVLVTAELILRGKDGSNLPILPPQRAPNLYMVPQGIRPVVQLTAIEILAWGLRNMKNFQMASITSPSLVVECGGERVESVVIKNLKKTPNFPSSVLFMKVFLPKEELYMPPLVIKVIDHRQFGRKPVVGQCTIERLDRFRCDPYAGKEDIVPQLKASLLSAPPCRDIVIEMEDTKPLLASKEEEIVDWWSKFYASSGEHEKCGQYIQKGYSKLKIYNCELENVAEFEGLTDFSDTFKLYRGKSDENEDPSVVGEFKGSFRIYPLPDDPSVPAPPRQFRELPDSVPQECTVRIYIVRGLELQPQDNNGLCDPYIKITLGKKVIEDRDHYIPNTLNPVFGRMYELSCYLPQEKDLKISVYDYDTFTRDEKVGETIIDLENRFLSRFGSHCGIPEEYCVSGVNTWRDQLRPTQLLQNVARFKGFPQPILSEDGSRIRYGGRDYSLDEFEANKILHQHLGAPEERLALHILRTQGLVPEHVETRTLHSTFQPNISQGKLQMWVDVFPKSLGPPGPPFNITPRKAKKYYLRVIIWNTKDVILDEKSITGEEMSDIYVKGWIPGNEENKQKTDVHYRSLDGEGNFNWRFVFPFDYLPAEQLCIVAKKEHFWSIDQTEFRIPPRLIIQIWDNDKFSLDDYLGFLELDLRHTIIPAKSPEKCRLDMIPDLKAMNPLKAKTASLFEQKSMKGWWPCYAEKDGARVMAGKVEMTLEILNEKEADERPAGKGRDEPNMNPKLDLPNRPETSFLWFTNPCKTMKFIVWRRFKWVIIGLLFLLILLLFVAVLLYSLPNYLSMKIVKPNV

SEQ ID NO: 261 - protein, 139 aa, Homo sapiens
MDKFWWHAAWGLCLVPLSLAQIDLNITCRFAGVFHVEKNGRYSISRTEAADLCKAFNSTLPTMAQMEKALSIGFETCSLHCSQQSKKVWAEEKASDQQWQWSCGGQKAKWTQRRGQQVSGNGAFGEQGVVRNSRPVYDS

SEQ ID NO: 262 - protein, 554 aa, Homo sapiens [sequence omitted]

SEQ ID NO: 263 - protein, 770 aa, Homo sapiens
MRGVWPPPVSALLSALGMSTYKRATLDEEDLVDSLSEGDAYPNGLQVNFHSPRSGQRCWAARTQVEKRLVVLVVLLAAGLVACLAALGIQYQTRSPSVCLSEACVSVTSSILSSMDPTVDPCHDFFSYACGGWIKANPVPDGHSRWGTFSNLWEHNQAIIKHLLENSTASVSEAERKAQVYYRACMNETRIEELRAKPLMELIERLGGWNITGPWAKDNFQDTLQVVTAHYRTSPFFSVYVSADSKNSNSNVIQVDQSGLGLPSRDYYLNKTENEKVLTGYLNYMVQLGKLLGGGDEEAIRPQMQQILDFETALANITIPQEKRRDEELIYHKVTAAELQTLAPAINWLPFLNTIFYPVEINESEPIVVYDKEYLEQISTLINTTDRCLLNNYMIWNLVRKTSSFLDQRFQDADEKFMEVMYGTKKTCLPRWKFCVSDTENNLGFALGPMFVKATFAEDSKSIATEIILEIKKAFEESLSTLKWMDEETRKSAKEKADAIYNMIGYPNFIMDPKELDKVFNDYTAVPDLYFENAMRFFNFSWRVTADQLRKAPNRDQWSMTPPMVNAYYSPTKNEIVFPAGILQAPFYTRSSPKALNFGGIGVVVGHELTHAFDDQGREYDKDGNLRPWWKNSSVEAFKRQTECMVEQYSNYSVNGEPVNGRHTLGENIADNGGLKAAYRAYQNWVKKNGAEHSLPTLGLTNNQLFFLGFAQVWCSVRTPESSHEGLITDPHSPSRFRVIGSLSNSKEFSEHFRCPPGSPMNPPHKCEVW

SEQ ID NO: 264 - protein, 767 aa, Homo sapiens
MEALRESVLHLALQMSTYKRATLDEEDLVDSLSEGDAYPNGLQVNFHSPRSGQRCWAARTQVEKRLVVLVVLLAAGLVACLAALGIQYQTRSPSVCLSEACVSVTSSILSSMDPTVDPCHDFFSYACGGWIKANPVPDGHSRWGTFSNLWEHNQAIIKHLLENSTASVSEAERKAQVYYRACMNETRIEELRAKPLMELIERLGGWNITGPWAKDNFQDTLQVVTAHYRTSPFFSVYVSADSKNSNSNVIQVDQSGLGLPSRDYYLNKTENEKVLTGYLNYMVQLGKLLGGGDEEAIRPQMQQILDFETALANITIPQEKRRDEELIYHKVTAAELQTLAPAINWLPFLNTIFYPVEINESEPIVVYDKEYLEQISTLINTTDRCLLNNYMIWNLVRKTSSFLDQRFQDADEKFMEVMYGTKKTCLPRWKFCVSDTENNLGFALGPMFVKATFAEDSKSIATEIILEIKKAFEESLSTLKWMDEETRKSAKEKADAIYNMIGYPNFIMDPKELDKVFNDYTAVPDLYFENAMRFFNFSWRVTADQLRKAPNRDQWSMTPPMVNAYYSPTKNEIVFPAGILQAPFYTRSSPKALNFGGIGVVVGHELTHAFDDQGREYDKDGNLRPWWKNSSVEAFKRQTECMVEQYSNYSVNGEPVNGRHTLGENIADNGGLKAAYRAYQNWVKKNGAEHSLPTLGLTNNQLFFLGFAQVWCSVRTPESSHEGLITDPHSPSRFRVIGSLSNSKEFSEHFRCPPGSPMNPPHKCEVW

SEQ ID NO: 265 - protein, 758 aa, Homo sapiens
MPLQGLGLQRNPFLQGKRGPGLTSSPPLLPPSLQVNFHSPRSGQRCWAARTQVEKRLVVLVVLLAAGLVACLAALGIQYQTRSPSVCLSEACVSVTSSILSSMDPTVDPCHDFFSYACGGWIKANPVPDGHSRWGTFSNLWEHNQAIIKHLLENSTASVSEAERKAQVYYRACMNETRIEELRAKPLMELIERLGGWNITGPWAKDNFQDTLQVVTAHYRTSPFFSVYVSADSKNSNSNVIQVDQSGLGLPSRDYYLNKTENEKVLTGYLNYMVQLGKLLGGGDEEAIRPQMQQILDFETALANITIPQEKRRDEELIYHKVTAAELQTLAPAINWLPFLNTIFYPVEINESEPIVVYDKEYLEQISTLINTTDRCLLNNYMIWNLVRKTSSFLDQRFQDADEKFMEVMYGTKKTCLPRWKFCVSDTENNLGFALGPMFVKATFAEDSKSIATEIILEIKKAFEESLSTLKWMDEETRKSAKEKADAIYNMIGYPNFIMDPKELDKVFNDYTAVPDLYFENAMRFFNFSWRVTADQLRKAPNRDQWSMTPPMVNAYYSPTKNEIVFPAGILQAPFYTRSSPKALNFGGIGVVVGHELTHAFDDQGREYDKDGNLRPWWKNSSVEAFKRQTECMVEQYSNYSVNGEPVNGRHTLGENIADNGGLKAAYRAYQNWVKKNGAEHSLPTLGLTNNQLFFLGFAQVWCSVRTPESSHEGLITDPHSPSRFRVIGSLSNSKEFSEHFRCPPGSPMNPPHKCEVW

SEQ ID NO: 266 - protein, 754 aa, Homo sapiens
MMSTYKRATLDEEDLVDSLSEGDAYPNGLQVNFHSPRSGQRCWAARTQVEKRLVVLVVLLAAGLVACLAALGIQYQTRSPSVCLSEACVSVTSSILSSMDPTVDPCHDFFSYACGGWIKANPVPDGHSRWGTFSNLWEHNQAIIKHLLENSTASVSEAERKAQVYYRACMNETRIEELRAKPLMELIERLGGWNITGPWAKDNFQDTLQVVTAHYRTSPFFSVYVSADSKNSNSNVIQVDQSGLGLPSRDYYLNKTENEKVLTGYLNYMVQLGKLLGGGDEEAIRPQMQQILDFETALANITIPQEKRRDEELIYHKVTAAELQTLAPAINWLPFLNTIFYPVEINESEPIVVYDKEYLEQISTLINTTDRCLLNNYMIWNLVRKTSSFLDQRFQDADEKFMEVMYGTKKTCLPRWKFCVSDTENNLGFALGPMFVKATFAEDSKSIATEIILEIKKAFEESLSTLKWMDEETRKSAKEKADAIYNMIGYPNFIMDPKELDKVFNDYTAVPDLYFENAMRFFNFSWRVTADQLRKAPNRDQWSMTPPMVNAYYSPTKNEIVFPAGILQAPFYTRSSPKALNFGGIGVVVGHELTHAFDDQGREYDKDGNLRPWWKNSSVEAFKRQTECMVEQYSNYSVNGEPVNGRHTLGENIADNGGLKAAYRAYQNWVKKNGAEHSLPTLGLTNNQLFFLGFAQVWCSVRTPESSHEGLITDPHSPSRFRVIGSLSNSKEFSEHFRCPPGSPMNPPHKCEVW

SEQ ID NO: 267 - protein, 735 aa, Homo sapiens
MEALRESVLHLALQMSTYKRATLDEEDLVDSLSEGDAYPNGLQVNFHSPRSGQRCWAARTQVEKRLVVLVVLLAAGLVACLAALGIQYQTRSPSVCLSEACVSVTSSILSSMDPTVDPCHDFFSYACGGWIKANPVPDGHSRWGTFSNLWEHNQAIIKHLLENSTASVSEAERKAQVYYRACMNETRIEELRAKPLMELIERLGGWNITGPWAKDNFQDTLQVVTAHYRTSPFFSVYVSADSKNSNSNVIQVDQSGLGLPSRDYYLNKTENEKVLTGYLNYMVQLGKLLGGGDEEAIRPQMQQILDFETALANITIPQEKRRDEELIYHKVTAAELQTLAPAINWLPFLNTIFYPVEINESEPIVVYDKEYLEQISTLINTTDRCLLNNYMIWNLVRKTSSFLDQRFQDADEKFMEVMYGTKKTCLPRWKFCVSDTENNLGFALGPMFVKATFAEDSKSIATEIILEIKKAFEESLSTLKWMDEETRKSAKEKADAIYNMIGYPNFIMDPKELDKVFNDYTAVPDLYFENAMRFFNFSWRVTADQLRKAPNRDQWSMTPPMVNAYYSPTKNEIVFPAGILQAPFYTRSSPKALNFGGIGVVVGHELTHAFDDQGREYDKDGNLRPWWKNSSVEAFKRQTECMVEQYSNYSVNGEPVNGRHTLGENIADNGGLKAAYRVWCSVRTPESSHEGLITDPHSPSRFRVIGSLSNSKEFSEHFRCPPGSPMNPPHKCEVW

SEQ ID NO: 268 - protein, 180 aa, Homo sapiens
MASTSYDYCRVPMEDGDKRCKLLLGIGILVLLIIVILGVPLIIFTIKANSEACRDGLRAVMECRNVTHLLQQELTEAQKGFQDVEAQAATCNHTVMALMASLDAEKAQGQKKVEELEGEITTLNHKLQDASAEVERLRRENQVLSVRIADKKYYPSSQDSSSAAAPQLLIVLLGLSALLQ

SEQ ID NO: 269 - protein, 158 aa, Homo sapiens
AVLCPPRYPKLAALNPESNTAEQDIFAKFSAYIKNSNPVVNDNLEKGLLKALKVLDNHLISCHSEEVDETSAEDEGISQRKFLDGNELTLADCNLLLTLHIVQVVCKKKKKYQGFTIPEAFQGVQQYLSNAYAQEESASTCPDDEIKLTYEQGSKALQ

SEQ ID NO: 270 - protein, 241 aa, Homo sapiens
MAEEQPQVELFVKAGSDGAKIGNCPFSQRLFMVLWLKGVTFNVTTVDTKRRTETVQKLCPGGQLPFLLYGTEVHTDTNKIEEFLEAVLCPPRYPKLAALNPESNTAGLDIFAKFSAYIKNSNPALNDNLEKGLLKALKVLDNYLTSPLPEEVDETSAEDEGVSQRKFLDGNELTLADCNLLPKLHIVQVVCKKYRGFTIPEAFRGVHRYLSNAYAREEFASTCPDDEEIELAYEQVAKALK

SEQ ID NO: 271 - protein, 178 aa, Homo sapiens
MSGGKYVDSEGHLYTVPIREQGNIYKPNNKAMADELSEKQVYDAHTKEIDLVNRDPKHLNDDVVKIDFEDVIAEPEGTHSFDGIWKASFTTFTVTKYWFYRLLSALFGIPMALIWGIYFAILSFLHIWAVVPCIKSFLIEIQCISRVYSIYVHTVCDPLFEAVGKIFSNVRINLQKEI

SEQ ID NO: 272 - protein, 147 aa, Homo sapiens
MADELSEKQVYDAHTKEIDLVNRDPKHLNDDVVKIDFEDVIAEPEGTHSFDGIWKASFTTFTVTKYWFYRLLSALFGIPMALIWGIYFAILSFLHIWAVVPCIKSFLIEIQCISRVYSIYVHTVCDPLFEAVGKIFSNVRINLQKEI

SEQ ID NO: 273 - protein, 1025 aa, Homo sapiens
MEPFTNDRLQLPRNMIENSMFEEEPDVVDLAKEPCLHPLEPDEVEYEPRGSRLLVRGLGEHEMEEDEEDYESSAKLLGMSFMNRSSGLRNSATGYRQSPDGACSVPSARTMVVCAFVIVVAVSVIMVIYLLPRCTFTKEGCHKKNQSIGLIQPFATNGKLFPWAQIRLPTAVVPLRYELSLHPNLTSMTFRGSVTISVQALQVTWNIILHSTGHNISRVTFMSAVSSQEKQAEILEYAYHGQIAIVAPEALLAGHNYTLKIEYSANISSSYYGFYGFSYTDESNEKKYFAATQFEPLAARSAFPCFDEPAFKATFIIKIIRDEQYTALSNMPKKSSVVLDDGLVQDEFSESVKMSTYLVAFIVGEMKNLSQDVNGTLVSIYAVPEKIGQVHYALETTVKLLEFFQNYFEIQYPLKKLDLVAIPDFEAGAMENWGLLTFREETLLYDSNTSSMADRKLVTKIIAHELAHQWFGNLVTMKWWNDLWLNEGFATFMEYFSLEKIFKELSSYEDFLDARFKTMKKDSLNSSHPISSSVQSSEQIEEMFDSLSYFKGSSLLLMLKTYLSEDVFQHAVVLYLHNHSYASIQSDDLWDSFNEVTNQTLDVKRMMKTWTLQKGFPLVTVQKKGKELFIQQERFFLNMKPEIQPSDTSYLWHIPLSYVTEGRNYSKYQSVSLLDKKSGVINLTEEVLWVKVNINMNGYYIVHYADDDWEALIHQLKINPYVLSDKDRANLINNIFELAGLGKVPLKRAFDLINYLGNENHTAPITEALFQTDLIYNLLEKLGYMDLASRLVTRVFKLLQNQIQQQTWTDEGTPSMRELRSALLEFACTHNLGNCSTTAMKLFDDWMASNGTQSLPTDVMTTVFKVGAKTDKGWSFLLGKYISIGSEAEKNKILEALASSEDVRKLYWLMKSSLNGDNFRTQKLSFIIRTVGRHFPGHLLAWDFVKENWNKLVQKFPLGSYTIQNIVAGSTYLFSTKTHLSEVQAFFENQSEATFRLRCVQEALEVIQLNIQWMEKNLKSLTWWL

SEQ ID NO: 274 - protein, 1091 aa, Homo sapiens
MAAAGQLCLLYLSAGLLSRLGAAFNLDTREDNVIRKYGDPGSLFGFSLAMHWQLQPEDKRLLLVGAPRAEALPLQRANRTGGLYSCDITARGPCTRIEFDNDADPTSESKEDQWMGVTVQSQGPGGKVVTCAHRYEKRQHVNTKQESRDIFGRCYVLSQNLRIEDDMDGGDWSFCDGRLRGHEKFGSCQQGVAATFTKDFHYIVFGAPGTYNWKGIVRVEQKNNTFFDMNIFEDGPYEVGGETEHDESLVPVPANSYLGFSLDSGKGIVSKDEITFVSGAPRANHSGAVVLLKRDMKSAHLLPEHIFDGEGLASSFGYDVAVVDLNKDGWQDIVIGAPQYFDRDGEVGGAVYVYMNQQGRWNNVKPIRLNGTKDSMFGIAVKNIGDINQDGYPDIAVGAPYDDLGKVFIYHGSANGINTKPTQVLKGISPYFGYSIAGNMDLDRNSYPDVAVGSLSDSVTIFRSRPVINIQKTITVTPNRIDLRQKTACGAPSGICLQVKSCFEYTANPAGYNPSISIVGTLEAEKERRKSGLSSRVQFRNQGSEPKYTQELTLKRQKQKVCMEETLWLQDNIRDKLRPIPITASVEIQEPSSRRRVNSLPEVLPILNSDEPKTAHIDVHFLKEGCGDDNVCNSNLKLEYKFCTREGNQDKFSYLPIQKGVPELVLKDQKDIALEITVTNSPSNPRNPTKDGDDAHEAKLIATFPDTLTYSAYRELRAFPEKQLSCVANQNGSQADCELGNPFKRNSNVTFYLVLSTTEVTFDTPDLDINLKLETTSNQDNLAPITAKAKVVIELLLSVSGVAKPSQVYFGGTVVGEQAMKSEDEVGSLIEYEFRVINLGKPLTNLGTATLNIQWPKEISNGKWLLYLVKVESKGLEKVTCEPQKEINSLNLTESHNSRKKREITEKQIDDNRKFSLFAERKYQTLNCSVNVNCVNIRCPLRGLDSKASLILRSRLWNSTFLEEYSKLNYLDILMRAFIDVTAAAENIRLPNAGTQVRVTVFPSKTVAQYSGVPWWIILVAILAGILMLALLVFILWKCGFFKRSRYDDSVPRYHAVRIRKEEREIKDEKYIDNLEKKQWITKWNENESYS

SEQ ID NO: 275 - protein, 1073 aa, Homo sapiens
MAAAGQLCLLYLSAGLLSRLGAAFNLDTREDNVIRKYGDPGSLFGFSLAMHWQLQPEDKRLLLVGAPRAEALPLQRANRTGGLYSCDITARGPCTRIEFDNDADPTSESKEDQWMGVTVQSQGPGGKVVTCAHRYEKRQHVNTKQESRDIFGRCYVLSQNLRIEDDMDGGDWSFCDGRLRGHEKFGSCQQGVAATFTKDFHYIVFGAPGTYNWKGIVRVEQKNNTFFDMNIFEDGPYEVGGETEHDESLVPVPANSYLGFSLDSGKGIVSKDEITFVSGAPRANHSGAVVLLKRDMKSAHLLPEHIFDGEGLASSFGYDVAVVDLNKDGWQDIVIGAPQYFDRDGEVGGAVYVYMNQQGRWNNVKPIRLNGTKDSMFGIAVKNIGDINQDGYPDIAVGAPYDDLGKVFIYHGSANGINTKPTQVLKGISPYFGYSIAGNMDLDRNSYPDVAVGSLSDSVTIFRSRPVINIQKTITVTPNRIDLRQKTACGAPSGICLQVKSCFEYTANPAGYNPSISIVGTLEAEKERRKSGLSSRVQFRNQGSEPKYTQELTLKRQKQKVCMEETLWLQDNIRDKLRPIPITASVEIQEPSSRRRVNSLPEVLPILNSDEPKTAHIDVHFLKEGCGDDNVCNSNLKLEYKFCTREGNQDKFSYLPIQKGVPELVLKDQKDIALEITVTNSPSNPRNPTKDGDDAHEAKLIATFPDTLTYSAYRELRAFPEKQLSCVANQNGSQADCELGNPFKRNSNVTFYLVLSTTEVTFDTPDLDINLKLETTSNQDNLAPITAKAKVVIELLLSVSGVAKPSQVYFGGTVVGEQAMKSEDEVGSLIEYEFRVINLGKPLTNLGTATLNIQWPKEISNGKWLLYLVKVESKGLEKVTCEPQKEINSLNLTESHNSRKKREITEKQIDDNRKFSLFAERKYQTLNCSVNVNCVNIRCPLRGLDSKASLILRSRLWNSTFLEEYSKLNYLDILMRAFIDVTAAAENIRLPNAGTQVRVTVFPSKTVAQYSGVPWWIILVAILAGILMLALLVFILWKCGFFKRNKKDHYDATYHKAEIHAQPSDKERLTSDA

SEQ ID NO: 276 - protein, 1130 aa, Homo sapiens
MAAAGQLCLLYLSAGLLSRLGAAFNLDTREDNVIRKYGDPGSLFGFSLAMHWQLQPEDKRLLLVGAPRAEALPLQRANRTGGLYSCDITARGPCTRIEFDNDADPTSESKEDQWMGVTVQSQGPGGKVVTCAHRYEKRQHVNTKQESRDIFGRCYVLSQNLRIEDDMDGGDWSFCDGRLRGHEKFGSCQQGVAATFTKDFHYIVFGAPGTYNWKGIVRVEQKNNTFFDMNIFEDGPYEVGGETEHDESLVPVPANSYLGLLFLTSVSYTDPDQFVYKTRPPREQPDTFPDVMMNSYLGFSLDSGKGIVSKDEITFVSGAPRANHSGAVVLLKRDMKSAHLLPEHIFDGEGLASSFGYDVAVVDLNKDGWQDIVIGAPQYFDRDGEVGGAVYVYMNQQGRWNNVKPIRLNGTKDSMFGIAVKNIGDINQDGYPDIAVGAPYDDLGKVFIYHGSANGINTKPTQVLKGISPYFGYSIAGNMDLDRNSYPDVAVGSLSDSVTIFRSRPVINIQKTITVTPNRIDLRQKTACGAPSGICLQVKSCFEYTANPAGYNPSISIVGTLEAEKERRKSGLSSRVQFRNQGSEPKYTQELTLKRQKQKVCMEETLWLQDNIRDKLRPIPITASVEIQEPSSRRRVNSLPEVLPILNSDEPKTAHIDVHFLKEGCGDDNVCNSNLKLEYKFCTREGNQDKFSYLPIQKGVPELVLKDQKDIALEITVTNSPSNPRNPTKDGDDAHEAKLIATFPDTLTYSAYRELRAFPEKQLSCVANQNGSQADCELGNPFKRNSNVTFYLVLSTTEVTFDTPDLDINLKLETTSNQDNLAPITAKAKVVIELLLSVSGVAKPSQVYFGGTVVGEQAMKSEDEVGSLIEYEFRVINLGKPLTNLGTATLNIQWPKEISNGKWLLYLVKVESKGLEKVTCEPQKEINSLNLTESHNSRKKREITEKQIDDNRKFSLFAERKYQTLNCSVNVNCVNIRCPLRGLDSKASLILRSRLWNSTFLEEYSKLNYLDILMRAFIDVTAAAENIRLPNAGTQVRVTVFPSKTVAQYSGVPWWIILVAILAGILMLALLVFILWKCGFFKRSRYDDSVPRYHAVRIRKEEREIKDEKYIDNLEKKQWITKWNENESYS

SEQ ID NO: 277 - protein, 387 aa, Homo sapiens
MSTFFSDTAWICLAVPTVLCGTVFCKYKKSSGQLWSWMVCLAGLCAVCLLILSPFWGLILFSVSCFLMYTYLSGQELLPVDQKAVLVTGGDCGLGHALCKYLDELGFTVFAGVLNENGPGAEELRRTCSPRLSVLQMDITKPVQIKDAYSKVAAMLQDRGLWAVINNAGVLGFPTDGELLLMTDYKQCMAVNFFGTVEVTKTFLPLLRKSKGRLVNVSSMGGGAPMERLASYGSSKAAVTMFSSVMRLELSKWGIKVASIQPGGFLTNIAGTSDKWEKLEKDILDHLPAEVQEDYGQDYILAQRNFLLLINSLASKDFSPVLRDIQHAILAKSPFAYYTPGKGAYLWICLAHYLPIGIYDYFAKRHFGQDKPMPRALRMPNYKKKAT

SEQ ID NO: 278 - protein, 308 aa, Homo sapiens [sequence omitted]

SEQ ID NO: 279 - protein, 379 aa, Homo sapiens [sequence omitted]

SEQ ID NO: 280 - protein, 645 aa, Homo sapiens [sequence omitted]

SEQ ID NO: 281 - protein, 278 aa, Homo sapiens [sequence omitted]

SEQ ID NO: 282 - protein, 565 aa, Homo sapiens
MAAAPRAGRRRGQPLLALLLLLLAPLPPGAPPGADAYFPEERWSPESPLQAPRVLIALLARNAAHALPTTLGALERLRHPRERTALWVATDHNMDNTSTVLREWLVAVKSLYHSVEWRPAEEPRSYPDEEGPKHWSDSRYEHVMKLRQAALKSARDMWADYILFVDADNLILNPDTLSLLIAENKTVVAPMLDSRAAYSNFWCGMTSQGYYKRTPAYIPIRKRDRRGCFAVPMVHSTFLIDLRKAASRNLAFYPPHPDYTWSFDDIIVFAFSCKQAEVQMYVCNKEEYGFLPVPLRAHSTLQDEAESFMHVQLEVMVKHPPAEPSRFISAPTKTPDKMGFDEVFMINLRRRQDRRERMLRALQAQEIECRLVEAVDGKAMNTSQVEALGIQMLPGYRDPYHGRPLTKGELGCFLSHYNIWKEVVDRGLQKSLVFEDDLRFEIFFKRRLMNLMRDVEREGLDWDLIYVGRKRMQVEHPEKAVPRVRNLVEADYSYWTLAYVISLQGARKLLAAEPLSKMLPVDEFLPVMFDKHPVTRPTSPSATCMPSLWSRCSSTPHTTQETMAM

SEQ ID NO: 283 - protein, 622 aa, Homo sapiens
MAAAPRAGRRRGQPLLALLLLLLAPLPPGAPPGADAYFPEERWSPESPLQAPRVLIALLARNAAHALPTTLGALERLRHPRERTALWVATDHNMDNTSTVLREWLVAVKSLYHSVEWRPAEEPRSYPDEEGPKHWSDSRYEHVMKLRQAALKSARDMWADYILFVDADNLILNPDTLSLLIAENKTVVAPMLDSRAAYSNFWCGMTSQGYYKRTPAYIPIRKRDRRGCFAVPMVHSTFLIDLRKAASRNLAFYPPHPDYTWSFDDIIVFAFSCKQAEVQMYVCNKEEYGFLPVPLRAHSTLQDEAESFMHVQLEVMVKHPPAEPSRFISAPTKTPDKMGFDEVFMINLRRRQDRRERMLRALQAQEIECRLVEAVDGKAMNTSQVEALGIQMLPGYRDPYHGRPLTKGELGCFLSHYNIWKEVVDRGLQKSLVFEDDLRFEIFFKRRLMNLMRDVEREGLDWDLIYVGRKRMQVEHPEKAVPRVRNLVEADYSYWTLAYVISLQGARKLLAAEPLSKMLPVDEFLPVMFDKHPVSEYKAHFSLRNLHAFSVEPLLIYPTHYTGDDGYVSDTETSVVWNNEHVKTDWDRAKSQKMREQQALSREAKNSDVLQSPLDSAARDEL

SEQ ID NO: 284 - protein, 956 aa, Homo sapiens
MRVNEKYSTLPAEDRSVHIINICAIEDIGYLPSEGTLLNSLSVDPDAECKYGLYFRDGRRKVDYILVYHHKRPSGNRTLVRRVQHSDTPSGARSVKQDHPLPGKGASLDAGSGEPPMDYHEDDKRFRREEYEGNLLEAGLELERDEDTKIHGVGFVKIHAPWNVLCREAEFLKLKMPTKKMYHINETRGLLKKINSVLQKITDPIQPKVAEHRPQTMKRLSYPFSREKQHLFDLSDKDSFFDSKTRSTIVYEILKRTTCTKAKYSMGITSLLANGVYAAAYPLHDGDYNGENVEFNDRKLLYEEWARYGVFYKYQPIDLVRKYFGEKIGLYFAWLGVYTQMLIPASIVGIIVFLYGCATMDENIPSMEMCDQRHNITMCPLCDKTCSYWKMSSACATARASHLFDNPATVFFSVFMALWAATFMEHWKRKQMRLNYRWDLTGFEEEEDHPRAEYEARVLEKSLKKESRNKETDKVKLTWRDRFPAYLTNLVSIIFMIAVTFAIVLGVIIYRISMAAALAMNSSPSVRSNIRVTVTATAVIINLVVIILLDEVYGCIARWLTKIEVPKTEKSFEERLIFKAFLLKFVNSYTPIFYVAFFKGRFVGRPGDYVYIFRSFRMEECAPGGCLMELCIQLSIIMLGKQLIQNNLFEIGIPKMKKLIRYLKLKQQSPPDHEECVKRKQRYEVDYNLEPFAGLTPEYMEMIIQFGFVTLFVASFPLAPLFALLNNIIEIRLDAKKFVTELRRPVAVRAKDIGIWYNILRGIGKLAVIINAFVISFTSDFIPRLVYLYMYSKNGTMHGFVNHTLSSFNVSDFQNGTAPNDPLDLGYEVQICRYKDYREPPWSENKYDISKDFWAVLAARLAFVIVFQNLVMFMSDFVDWVIPDIPKDISQQIHKEKVLMVELFMREEQDKQQLLETWMEKERQKDEPPCNHHNTKACPDSLGSPAPSHAYHGGVL

SEQ ID NO: 285 - protein, 31 aa, Homo sapiens
ASKCLAPSPKGAFPRWRHRLLSRMFGAREFV

SEQ ID NO: 286 - protein, 580 aa, Homo sapiens
MIISIDAEKAFDKIQQPFMLKTLNKLGIDGTYLKIIRAIYGKPTANIILNGQKLEAFPLKTGTRQGCPLSSLLFNIVLELLARAIRQEKEIKGIQLGKEEVKLSLFADGMIVYLANPIVSAQSLLKLISNFSKVSGYKINVQKSQAFLYANNRQTESQVMSELPFTIASKRIKYLGIELTRDVKDLFKENYKPLLNEIKEDTNKWKNIPCSWIGRINIVKMAILPKLGKNFLCINGKSRKEYKFLICHFQNCQAPQHFYELFRSSALSQSEDAEEELARKDGLEWTSKQTPADLQQRGLTVRRKTNKQKGIASTSTKRMSMQKPHPNVPNIKDQRIRKNYFKFHMEPKKAHIAKTILSKKNRAGGIKLPDFQLYYEATVIKTAWYWYQTRYIDQWNRTKASEITSHIYNHLIFDNPYKNKQWGKDFLFNKCCWENWLAMCRKLKLDPFFTPYTKINSRWNKDLKLRPKTIKTIEENLCNTIQDIGMGKDFMTKTPKAMATKAKIDKWVLIKLKIFCTAKETIAGSGQQPAMHWGSLFVPRWIGRSRNNRHTQDSESWVQGGNRLLVTWCRQCTGYTSIYY

SEQ ID NO: 287 - protein, 47 aa, Homo sapiens
EDLQEYLDPLQKWLRSEIRKLIKKEGKEKMRWKKSQQLCKKLTKRKF

SEQ ID NO: 288 - protein, 51 aa, Homo sapiens
AEGEGGEFLFVFGSLPCLTPGPSVWSHVLRYVCLVRVLVSIKSNCNISPNP

SEQ ID NO: 289 - DNA, 1852 bp, Homo sapiens
ttatagcgcgcggggcaccggctccccaagactgcgagctccccgcaccccctcgcactccctctggccggcccagggcgccttcagcccaacctccccagccccacgggcgccacggaacccgctcgatctcgccgccaactggtagacatggagacccctgcctggccccgggtcccgcgccccgagaccgccgtcgctcggacgctcctgctcggctgggtcttcgcccaggtggccggcgcttcaggcactacaaatactgtggcagcatataatttaacttggaaatcaactaatttcaagacaattttggagtgggaacccaaacccgtcaatcaagtctacactgttcaaataagcactaagtcaggagattggaaaagcaaatgcttttacacaacagacacagagtgtgacctcaccgacgagattgtgaaggatgtgaagcagacgtacttggcacgggtcttctcctacccggcagggaatgtggagagcaccggttctgctggggagcctctgtatgagaactccccagagttcacaccttacctggagacaaacctcggacagccaacaattcagagttttgaacaggtgggaacaaaagtgaatgtgaccgtagaagatgaacggactttagtcagaaggaacaacactttcctaagcctccgggatgtttttggcaaggacttaatttatacactttattattggaaatcttcaagttcaggaaagaaaacagccaaaacaaacactaatgagtttttgattgatgtggataaaggagaaaactactgtttcagtgttcaagcagtgattccctcccgaacagttaaccggaagagtacagacagcccggtagagtgtatgggccaggagaaaggggaattcagagaaatattctacatcattggagctgtggtatttgtggtcatcatccttgtcatcatcctggctatatctctacacaagtgtagaaaggcaggagtggggcagagctggaaggagaactccccactgaatgtttcataaaggaagcactgttggagctactgcaaatgctatattgcactgtgaccgagaacttttaagaggatagaatacatggaaacgcaaatgagtatttcggagcatgaagaccctggagttcaaaaaactcttgatatgacctgttattaccattagcattctggttttgacatcagcattagtcactttgaaatgtaacgaatggtactacaaccaattccaagttttaatttttaacaccatggcaccttttgcacataacatgctttagattatatattccgcactcaaggagtaaccaggtcgtccaagcaaaaacaaatgggaaaatgtcttaaaaaatcctgggtggacttttgaaaagctttttttttttttttttttttgagacggagtcttgctctgttgcccaggctggagtgcagtagcacgatctcggctcactgcaccctccgtctctcgggttcaagcaattgtctgcctcagcctcccgagtagctgggattacaggtgcgcactaccacaccaagctaatttttgtattttttagtagagatggggtttcaccatccgaaaagcttttgaggggctgacttcaatccatgtaggaaagtaaaatggaaggaaattgggtgcatttctaggacttttctaacatatgtctataatatagtgtttaggttcttttttttttcaggaatacatttggaaattcaaaacaattggcaaactttgtattaatgtgttaagtgcaggagacattggtattctgggcaccttcctaatatgctttacaatctgcactttaactgactta

SEQ ID NO: 290 - DNA, 2319 bp, Homo sapiens
ttatagcgcgcggggcaccggctccccaagactgcgagctccccgcaccccctcgcactccctctggccggcccagggcgccttcagcccaacctccccagccccacgggcgccacggaacccgctcgatctcgccgccaactggtagacatggagacccctgcctggccccgggtcccgcgccccgagaccgccgtcgctcggacgctcctgctcggctgggtcttcgcccaggtggccggcgcttcaggcactacaaatactgtggcagcatataatttaacttggaaatcaactaatttcaagacaattttggagtgggaacccaaacccgtcaatcaagtctacactgttcaaataagcactaagtcaggagattggaaaagcaaatgcttttacacaacagacacagagtgtgacctcaccgacgagattgtgaaggatgtgaagcagacgtacttggcacgggtcttctcctacccggcagggaatgtggagagcaccggttctgctggggagcctctgtatgagaactccccagagttcacaccttacctggagacaaacctcggacagccaacaattcagagttttgaacaggtgggaacaaaagtgaatgtgaccgtagaagatgaacggactttagtcagaaggaacaacactttcctaagcctccgggatgtttttggcaaggacttaatttatacactttattattggaaatcttcaagttcaggaaagaaaacagccaaaacaaacactaatgagtttttgattgatgtggataaaggagaaaactactgtttcagtgttcaagcagtgattccctcccgaacagttaaccggaagagtacagacagcccggtagagtgtatgggccaggagaaaggggaattcagagaaatattctacatcattggagctgtggtatttgtggtcatcatccttgtcatcatcctggctatatctctacacaagtgtagaaaggcaggagtggggcagagctggaaggagaactccccactgaatgtttcataaaggaagcactgttggagctactgcaaatgctatattgcactgtgaccgagaacttttaagaggatagaatacatggaaacgcaaatgagtatttcggagcatgaagaccctggagttcaaaaaactcttgatatgacctgttattaccattagcattctggttttgacatcagcattagtcactttgaaatgtaacgaatggtactacaaccaattccaagttttaatttttaacaccatggcaccttttgcacataacatgctttagattatatattccgcactcaaggagtaaccaggtcgtccaagcaaaaacaaatgggaaaatgtcttaaaaaatcctgggtggacttttgaaaagctttttttttttttttttttttgagacggagtcttgctctgttgcccaggctggagtgcagtagcacgatctcggctcactgcaccctccgtctctcgggttcaagcaattgtctgcctcagcctcccgagtagctgggattacaggtgcgcactaccacaccaagctaatttttgtattttttagtagagatggggtttcaccatcttggccaggctggtcttgaattcctgacctcaggtgatccacccaccttggcctcccaaagtgctagtattatgggcgtgaaccaccatgcccagccgaaaagcttttgaggggctgacttcaatccatgtaggaaagtaaaatggaaggaaattgggtgcatttctaggacttttctaacatatgtctataatatagtgtttaggttcttttttttttcaggaatacatttggaaattcaaaacaattggcaaactttgtattaatgtgttaagtgcaggagacattggtattctgggcaccttcctaatatgctttacaatctgcactttaactgacttaagtggcattaaacatttgagagctaactatatttttataagactactatacaaactacagagtttatgatttaaggtacttaaagcttctatggttgacattgtatatataattttttaaaaaggttttctatatggggattttctatttatgtaggtaatattgttctatttgtatatattgagataatttatttaatatactttaaataaaggtgactgggaattgttactgttgtacttattctatcttccatttattatttatgtacaatttggtgtttgtattagctctactacagtaaatgactgtaaaattgtcagtggcttacaacaacgtatctttttcgcttataatacattttggtgact

SEQ ID NO: 291 - DNA, 1651 bp, Homo sapiens
caccagcggccagaggtgagcagtcccgggaaggggccgagaggcggggccgccaggtcgggcaggtgtgcgctccgccccgccgcgcgcacagagcgctagtccttcggcgagcgagcaccttcgacgcggtccggggaccccctcgtcgctgtcctcccgacgcggacccgcgtgccccaggcctcgcgctgcccggccggctcctcgtgtcccactcccggcgcacgccctcccgcgagtcccgggcccctcccgcgcccctcttctcggcgcgcgcgcagcatggcgcccccgcaggtcctcgcgttcgggcttctgcttgccgcggcgacggcgacttttgccgcagctcaggaagaatgtgtctgtgaaaactacaagctggccgtaaactgctttgtgaataataatcgtcaatgccagtgtacttcagttggtgcacaaaatactgtcatttgctcaaagctggctgccaaatgtttggtgatgaaggcagaaatgaatggctcaaaacttgggagaagagcaaaacctgaaggggccctccagaacaatgatgggctttatgatcctgactgcgatgagagcgggctctttaaggccaagcagtgcaacggcacctccatgtgctggtgtgtgaacactgctggggtcagaagaacagacaaggacactgaaataacctgctctgagcgagtgagaacctactggatcatcattgaactaaaacacaaagcaagagaaaaaccttatgatagtaaaagtttgcggactgcacttcagaaggagatcacaacgcgttatcaactggatccaaaatttatcacgagtattttgtatgagaataatgttatcactattgatctggttcaaaattcttctcaaaaaactcagaatgatgtggacatagctgatgtggcttattattttgaaaaagatgttaaaggtgaatccttgtttcattctaagaaaatggacctgacagtaaatggggaacaactggatctggatcctggtcaaactttaatttattatgttgatgaaaaagcacctgaattctcaatgcagggtctaaaagctggtgttattgctgttattgtggttgtggtgatagcagttgttgctggaattgttgtgctggttatttccagaaagaagagaatggcaaagtatgagaaggctgagataaaggagatgggtgagatgcatagggaactcaatgcataactatataatttgaagattatagaagaagggaaatagcaaatggacacaaattacaaatgtgtgtgcgtgggacgaagacatctttgaaggtcatgagtttgttagtttaacatcatatatttgtaatagtgaaacctgtactcaaaatataagcagcttgaaactggctttaccaatcttgaaatttgaccacaagtgtcttatatatgcagatctaatgtaaaatccagaacttggactccatcgttaaaattatttatgtgtaacattcaaatgtgtgcattaaatatgcttccacagtaaaatctgaaaaactgatttgtgattgaaagctgcctttctatttacttgagtcttgtacatacatacttttttatgagctatgaaataaaacattttaaactgaatttcttaactttga

SEQ ID NO: 292 - DNA, 1606 bp, Homo sapiens
cgcgcgcgcagcatggcgcccccgcaggtcctcgcgttcgggcttctgcttgccgcggcgacggcgacttttgccgcagctcaggaaggtgaggcgcggattggagcagagttgtggagctgggctgggctggggggcagcggcccccggccctcggcccccgaaacgggcataatagggaggggaccaagaggccgcgctttccagcgtggagaccggacggtgcggccgtgctccggctcaggccctccgcgcggtaggaaacggcgagggccgtcccggggagcagcctcacttcgcagctttgctcgccttgaatgtgtctgtgaaaactacaagctggccgtaaactgctttgtgaataataatcgtcaatgccagtgtacttcagttggtgcacaaaatactgtcatttgctcaaagctggctgccaaatgtttggtgatgaaggcagaaatgaatggctcaaaacttgggagaagagcaaaacctgaaggggccctccagaacaatgatgggctttatgatcctgactgcgatgagagcgggctctttaaggccaagcagtgcaacggcacctccatgtgctggtgtgtgaacactgctggggtcagaagaacagacaaggacactgaaataacctgctctgagcgagtgagaacctactggatcatcattgaactaaaacacaaagcaagagaaaaaccttatgatagtaaaagtttgcggactgcacttcagaaggagatcacaacgcgttatcaactggatccaaaatttatcacgagtattttgtatgagaataatgttatcactattgatctggttcaaaattcttctcaaaaaactcagaatgatgtggacatagctgatgtggcttattattttgaaaaagatgttaaaggtgaatccttgtttcattctaagaaaatggacctgacagtaaatggggaacaactggatctggatcctggtcaaactttaatttattatgttgatgaaaaagcacctgaattctcaatgcagggtctaaaagctggtgttattgctgttattgtggttgtggtgatagcagttgttgctggaattgttgtgctggttatttccagaaagaagagaatggcaaagtatgagaaggctgagataaaggagatgggtgagatgcatagggaactcaatgcataactatataatttgaagattatagaagaagggaaatagcaaatggacacaaattacaaatgtgtgtgcgtgggacgaagacatctttgaaggtcatgagtttgttagtttaacatcatatatttgtaatagtgaaacctgtactcaaaatataagcagcttgaaactggctttaccaatcttgaaatttgaccacaagtgtcttatatatgcagatctaatgtaaaatccagaacttggactccatcgttaaaattatttatgtgtaacattcaaatgtgtgcattaaatatgcttccacagtaaaatctgaaaaactgatttgtgattgaaagctgcctttctatttacttgagtcttgtacatacatacttttttatgagctatgaaataaaacattttaaactgaatttcttaactttga

SEQ ID NO: 293 - DNA, 1504 bp, Homo sapiens
gagcgagcaccttcgacgcggtccggggaccccctcgtcgctgtcctcccgacgcggacccgcgtgccccaggcctcgcgctgcccggccggctcctcgtgtcccactcccggcgcacgccctcccgcgcccctcttctcggcgcgcgcgcagcatggcgcccccgcaggtcctcgcgttcgggcttctgcttgccgcggcgacggcgacttttgccgcagctcaggaagaatgtgtctgtgaaaactacaagctggccgtaaactgctttgtgaataataatcgtcaatgccagtgtacttcagttggtgcacaaaatactgtcatttgctcaaagctggctgccaaatgtttggtgatgaaggcagaaatgaatggctcaaaacttgggagaagagcaaaacctgaaggggccctccagaacaatgatgggctttatgatcctgactgcgatgagagcgggctctttaaggccaagcagtgcaacggcacctccacgtgctggtgtgtgaacactgctggggtcagaagaacagacaaggacactgaaataacctgctctgagcgagtgagaacctactggatcatcattgaactaaaacacaaagcaagagaaaaaccttatgatagtaaaagtttgcggactgcacttcagaaggagatcacaacgcgttatcaactggatccaaaatttatcacgagtattttgtatgagaataatgttatcactattgatctggttcaaaattcttctcaaaaaactcagaatgatgtggacatagctgatgtggcttattattttgaaaaagatgttaaaggtgaatccttgtttcattctaagaaaatggacctgacagtaaatggggaacaactggatctggatcctggtcaaactttaatttattatgttgatgaaaaagcacctgaattctcaatgcagggtctaaaagctggtgttattgctgttattgtggttgtggtgatggcagttgttgctggaattgttgtgctggttatttccagaaagaagagaatggcaaagtatgagaaggctgagataaaggagatgggtgagatgcatagggaactcaatgcataactatataatttgaagattatagaagaagggaaatagcaaatggacacaaattacaaatgtgtgtgcgtgggacgaagacatctttgaaggtcatgagtttgttagtttaacatcatatatttgtaatagtgaaacctgtactcaaaatataagcagcttgaaactggctttaccaatcttgaaatttgaccacaagtgtcttatatatgcagatctaatgtaaaatccagaacttggactccatcgttaaaattatttatgtgtaacattcaaatgtgtgcattaaatatgcttccacagtaaaatctgaaaaactgatttgtgattgaaagctgcctttctatttacttgagtcttgtacatacatacttttttatgagctatgaaataaaacattttaaactg

SEQ ID NO: 294 - DNA, 4125 bp, Homo sapiens
caatcgcgaggcggcgggcgatcccgggctccccgggctgtgggctacaggcgcagagcgggccaggcgcggagctggcggcagtgacaggaggcgcgaacccgcagcgcttaccgcgcggcgccgcaccatggagcccgccgtgtcgctggccgtgtgcgcgctgctcttcctgctgtgggtgcgcctgaaggggctggagttcgtgctcatccaccagcgctgggtgttcgtgtgcctcttcctcctgccgctctcgcttatcttcgatatctactactacgtgcgcgcctgggtggtgttcaagctcagcagcgctccgcgcctgcacgagcagcgcgtgcgggacatccagaagcaggtgcgggaatggaaggagcagggtagcaagaccttcatgtgcacggggcgccctggctggctcactgtctcactacgtgtcgggaagtacaagaagacacacaaaaacatcatgatcaacctgatggacattctggaagtggacaccaagaaacagattgtccgtgtggagcccttggtgaccatgggccaggtgactgccctgctgacctccattggctggactctccccgtgttgcctgagcttgatgacctcacagtggggggcttgatcatgggcacaggcatcgagtcatcatcccacaagtacggcctgttccaacacatctgcactgcttacgagctggtcctggctgatggcagctttgtgcgatgcactccgtccgaaaactcagacctgttctatgccgtaccctggtcctgtgggacgctgggtttcctggtggccgctgagatccgcatcatccctgccaagaagtacgtcaagctgcgtttcgagccagtgcggggcctggaggctatctgtgccaagttcacccacgagtcccagcggcaggagaaccacttcgtggaagggctgctctactccctggatgaggctgtcattatgacaggggtcatgacagatgaggcagagcccagcaagctgaatagcattggcaattactacaagccgtggttctttaagcatgtggagaactatctgaagacaaaccgagagggcctggagtacattcccttgagacactactaccaccgccacacgcgcagcatcttctgggagctccaggacattatcccctttggcaacaaccccatcttccgctacctctttggctggatggtgcctcccaagatctccctcctgaagctgacccagggtgagaccctgcgcaagctgtacgagcagcaccacgtggtgcaggacatgctggtgcccatgaagtgcctgcagcaggccctgcacaccttccaaaacgacatccacgtctaccccatctggctgtgtccgttcatcctgcccagccagccaggcctagtgcaccccaaaggaaatgaggcagagctctacatcgacattggagcatatggggagccgcgtgtgaaacactttgaagccaggtcctgcatgaggcagctggagaagtttgtccgcagcgtgcatggcttccagatgctgtatgccgactgctacatgaaccgggaggagttctgggagatgtttgatggctccttgtaccacaagctgcgagagaagctgggttgccaggacgccttccccgaggtgtacgacaagatctgcaaggccgccaggcactgagctggagcccgcctggagagacagacacgtgtgagtggtcaggcatcttcccttcactcaagcttggctgctttcctagatccacactttcaaagagaaacccctccagaactcccaccctgacagcccaacaccaccttcctcctggcttccagggggcagcccagtggaatggaaagaatgtgggatttggagtcagacaagcctgagtccagttccccgtttagaactcattagctgtgtgactctgggtgagtcccttaacccctctgagcccgggtctcttcattagttgaaagggatagtaatacctacttgcaggttgttgtcatctgagttgagcactggtcacattgaaggtgctgggtaagtggtagctcttgttgcttcccgttcagcgtcacatctgcagtggagcctgaaaaggctccacattaggtcacctgtgcacagccatggctggaatgatgaaggggatacgctggagttgccctgccatcgcctccatcagccagacgaggtcctcacaggagaggccccagatgcgctgtgccaaagccaggtccgaggccaaagttctccctgccatccttggtgccgtcctgccccttcctccttcatgcctgggcctgcaggcccaccccagccaccactgagtccactcggagtgccctgtgttcctggagaaggcattccagggttgaatcttgtcccagcctcagcctgggacacctaggtggagagagtggtctccgctctgaattggatccaggggacctgggctcattcttcttggctcaccaaccctgcaggcctcatctttcccaaaacccactttgtcttggtgggagtgggtccgcgctgctctgcagcaggggctggggagtggacagcatcaggtgggaaagtggagtccaccctcatgtttctgtaggattctcaccgtggggctggaagaaaagagcatcgacttgatttctccaaccactcatccctctttttctttcttccaccactccccaccccagctgtagttaatttcagtgccttacaaatcctaagctcagagaaagttccatttccgttccagagggaagggaacctccctaggtccttccctggcttgttataacgcaaagcttggttgtttatgcaactctatcttaagaactgcccagcctcagctgaaaacccgaatctgagttgtggcgtgtgagtcaggagacctaggtttcagcccctctctactgtcagcgagctgtgcaacgtgggcaagtcattgtcctctgagctgcagtttcctcatctgtcacatcgctacagacaagacctccctggaacccttctgattgtcttagacactgtggttgcaaaacccacggaaagcctcatttgtgtggaaagtcagaggaaaacccaaggtcagctcccatctcatttccagaaaggctcatacctggcttgcagggaagcatctgtcttgtcattccaggtgccagaatcctctcagagtcattgaagggtgttcacccatcccacccaaggcttggcacactgccagtgtcttagcagggtcttgtgagggctgggggcatccaggcactcagaaggcaaaggaaccaccctacccatttggcctctggagggggcagaagaaagaaagaaacctcatcctatattttacaaagcatgtgaattctggcattagctctcataggagacccatgtgcttccttgctcagtgcaaaactgatgattctacttgctgtagatgaatggttaacacgagctagttaaacagtgccattgttttgccagtgaagcctccaaccctaagccactgggacggtggccagagatgccagcagcctctgtcgcccttagtcatataaccaaaatccagaccttatccacaacccggggcttggaaaggaaggtattttggaatcacaccctccggttatgttgctccagtaaaatcttgcctggaaagaggcagtcttcttagcatggtgagctgagttcatggcttttttttgtagccagtcctgtccctggccatccatgtgatggttttggatggagttaaacttgatgccagtgggcagtgcatgtggaaagtatcagagtaaggctctcccctccagagccctgagtttcttggctgcatgaaggttttctttagaatcagaattgtagccagtttctttggccagaaggatgaatacttggatattactgaaagggaggggtggagatgggtgtggcagtgtatggtgtgtgatttttattttcttctttggtcatgggggccaaggagaaaggcatgaatcttccctgtcaggctcttacagccacaggcactgtgtctactgtctggaagacatgtccccgtggctgtggggccgctgcttctgtttaaataaaagtggcctggaagctgg

SEQ ID NO: 295 - DNA, 4286 bp, Homo sapiens
caatcgcgaggcggcgggcgatcccgggctccccgggctgtgggctacaggcgcagagcgggccaggcgcggagctggcggcagtgacaggaggcgcgaacccgcagcgcttaccgcgcggcgccgcaccatggagcccgccgtgtcgctggccgtgtgcgcgctgctcttcctgctgtgggtgcgcctgaaggggctggagttcgtgctcatccaccagcgctgggtgttcgtgtgcctcttcctcctgccgctctcgcttatcttcgatatctactactacgtgcgcgcctgggtggtgttcaagctcagcagcgctccgcgcctgcacgagcagcgcgtgcgggacatccagaagcaggtgcgggaatggaaggagcagggtagcaagaccttcatgtgcacggggcgccctggctggctcactgtctcactacgtgtcgggaagtacaagaagacacacaaaaacatcatgatcaacctgatggacattctggaagtggacaccaagaaacagattgtccgtgtggagcccttggtgaccatgggccaggtgactgccctgctgacctccattggctggactctccccgtgttgcctgagcttgatgacctcacagtggggggcttgatcatgggcacaggcatcgagtcatcatcccacaagtacggcctgttccaacacatctgcactgcttacgagctggtcctggctgatggcagctttgtgcgatgcactccgtccgaaaactcagacctgttctatgccgtaccctggtcctgtgggacgctgggtttcctggtggccgctgagatccgcatcatccctgccaagaagtacgtcaagctgcgtttcgagccagtgcggggcctggaggctatctgtgccaagttcacccacgagtcccagcggcaggagaaccacttcgtggaagggctgctctactccctggatgaggctgtcattatgacaggggtcatgacagatgaggcagagcccagcaagctgaatagcattggcaattactacaagccgtggttctttaagcatgtggagaactatctgaagacaaaccgagagggcctggagtacattcccttgagacactactaccaccgccacacgcgcagcatcttctgggagctccaggacattatcccctttggcaacaaccccatcttccgctacctctttggctggatggtgcctcccaagatctccctcctgaagctgacccagggtgagaccctgcgcaagctgtacgagcagcaccacgtggtgcaggacatgctggtgcccatgaagtgcctgcagcaggccctgcacaccttccaaaacgacatccacgtctaccccatctggctgtgtccgttcatcctgcccagccagccaggcctagtgcaccccaaaggaaatgaggcagagctctacatcgacattggagcatatggggagccgcgtgtgaaacactttgaagccaggtcctgcatgaggcagctggagaagtttgtccgcagcgtgcatggcttccagatgctgtatgccgactgctacatgaaccgggaggagttctgggagatgtttgatggctccttgtaccacaagctgcgagagaagctgggttgccaggacgccttccccgaggtgtacgacaagatctgcaaggccgccaggcactgagctggagcccgcctggagagacagacacgtgtgagtggtcaggcatcttcccttcactcaagcttggctgctttcctagatccacactttcaaagagaaacccctccagaactcccaccctgacagcccaacaccaccttcctcctggcttccagggggcagcccagtggaatggaaagaatgtgggatttggagtcagacaagcctgagtccagttccccgtttagaactcattagctgtgtgactctgggtgagtcccttaacccctctgagcccgggtctcttcattagttgaaagggatagtaatacctacttgcaggttgttgtcatctgagttgagcactggtcacattgaaggtgctgggtaagtggtagctcttgttgcttcccgttcagcgtcacatctgcagtggagcctgaaaaggctccacattaggtcacctgtgcacagccatggctggaatgatgaaggggatacgctggagttgccctgccatcgcctccatcagccagacgaggtcctcacaggagaaggacagctcttccccaccctgggatctcaggagggcagccacggagtggggaggccccagatgcgctgtgccaaagccaggtccgaggccaaagttctccctgccatccttggtgccgtcctgccccttcctccttcatgcctgggcctgcaggcccaccccagccaccactgagtccactcggagtgccctgtgttcctggagaaggcattccagggttgaatcttgtcccagcctcagcctgggacacctaggtggagagagtggtctccgctctgaattggatccaggggacctgggctcattcttcttggctcaccaaccctgcaggcctcatctttcccaaaacccactttgtcttggtgggagtgggtccgcgctgctctgcagcaggggctggggagtggacagcatcaggtgggaaagtggagtccaccctcatgtttctgtaggattctcaccgtggggctggaagaaaagagcatcgacttgatttctccaaccactcatccctctttttctttcttccaccactccccaccccagctgtagttaatttcagtgccttacaaatcctaagctcagagaaagttccatttccgttccagagggaagggaacctccctaggtccttccctggcttgttataacgcaaagcttggttgtttatgcaactctatcttaagaactgcccagcctcagctgaaaacccgaatctgagaaggaattgcgtcatgtaagggaagctggaattaagggagctgagccagtcatggttgtggcgtgtgagtcaggagacctaggtttcagcccctctctactgtcagcgagctgtgcaacgtgggcaagtcattgtcctctgagctgcagtttcctcatctgtcacatcgctacagacaagacctccctggaacccttctgattgtcttagacactgtggttgcaaaacccacggaaagcctcatttgtgtggaaagtcagaggaaaaatgatccagtggacacttggggattatctgtcattcaagatccttccttcaaccccaaggtcagctcccatctcatttccagaaaggctcatacctggcttgcagggaagcatctgtcttgtcattccaggtgccagaatcctctcagagtcattgaagggtgttcacccatcccacccaaggcttggcacactgccagtgtcttagcagggtcttgtgagggctgggggcatccaggcactcagaaggcaaaggaaccaccctacccatttggcctctggagggggcagaagaaagaaagaaacctcatcctatattttacaaagcatgtgaattctggcattagctctcataggagacccatgtgcttccttgctcagtgcaaaactgatgattctacttgctgtagatgaatggttaacacgagctagttaaacagtgccattgttttgccagtgaagcctccaaccctaagccactgggacggtggccagagatgccagcagcctctgtcgcccttagtcatataaccaaaatccagaccttatccacaacccggggcttggaaaggaaggtattttggaatcacaccctccggttatgttgctccagtaaaatcttgcctggaaagaggcagtcttcttagcatggtgagctgagttcatggcttttttttgtagccagtcctgtccctggccatccatgtgatggttttggatggagttaaacttgatgccagtgggcagtgcatgtggaaagtatcagagtaaggctctcccctccagagccctgagtttcttggctgcatgaaggttttctttagaatcagaattgtagccagtttctttggccagaaggatgaatacttggatattactgaaagggaggggtggagatgggtgtggcagtgtatggtgtgtgatttttattttcttctttggtcatgggggccaaggagaaaggcatgaatcttccctgtcaggctcttacagccacaggcactgtgtctactgtctggaagacatgtccccgtggctgtggggccgctgcttctgtttaaataaaagtggcctggaagctgg

SEQ ID NO: 296 - DNA, 1681 bp, Homo sapiens
aaatagcactgtaaaaagtgaactgttaaaactaaaggcacttaaaacaagaatgtgactagtgtgaaacaagatgggcaactcaaatggtgagaagtaaacatacagtggtctgttatggcactaactcaaagtaagactcgcgtaggtgagagctgttgcatagccacagtataacttcacatgttcattaaaaaggcaaattgaccgctaaaacttcaaagaaaaagtactcataaaaaaagtcttaccccaaaattgcaaacaaatacattaaaagattagaagaggtgacagaaagcaccagacattaaacaaaataaaaataataaaataaattcaactcaaaaggtccccattcagcaacagaaaattgctcggttcttttatctaaggcttgaatttgtaaagtgaaggcataaaagttaccaaacattaagtaactcttaaaatggcacacaggttttaaagctattggtttttccttcctaactctctgaatttttcccatggcctttgtagatcaactatttcaaacgtattttacaccagcaactctcaacatacttgtctttcagatatgtcatcagtcatgtctaacaggcaaatagcaaaataacagatttaaaacaatccttaactagctagcaggacatttactttggattctgcataactgcaaactgacatatttgtaaagctaaaaatcagttttaatacatgattaacagaaactctcatcatgctcattactttaactattgccctttcaatcgctatagaaatatcacttaatccaataagcttgatttcaatagtccaggaagaaaaggtcaaaaaggcacaatgtgaccttagctgacaagaataaccatcctgtctcaagtcttttgtcagtccctggcatgaattacaacattattttcaaaataataaaacattttaaaaattatactagtacttgtgaagccagcaacggacagatctgcaatggccggggcatctgcgagtgtggtgtctgtaagtgtacagatccgaagtttcaagggcaaacgtgtgagatgtgtcagacctgccttggtgtctgtgctgagcataaagaatgtgttcagtgcagagccttcaataaaggagaaaagaaagacacatgcacacaggaatgttcctattttaacattaccaaggtagaaagtcgggacaaattaccccagccggtccaacctgatcctgtgtcccattgtaaggagaaggatgttgacgactgttggttctattttacgtattcagtgaatgggaacaacgaggtcatggttcatgttgtggagaatccagagtgtcccactggtccagacatcattccaattgtagctggtgtggttgctggaattgttcttattggccttgcattactgctgatatggaagcttttaatgataattcatgacagaagggagtttgctaaatttgaaaaggagaaaatgaatgccaaatgggacacgggtgaaaatcctatttataagagtgccgtaacaactgtggtcaatccgaagtatgagggaaaatgagtactgcccgtgcaaatcccacaacactgaatgcaaagtagcaatttccatagtcacagttaggtagctttagggcaatattgccatggttttactcaagtccaggagttttagac

SEQ ID NO: 297 - DNA, 3750 bp, Homo sapiens
atgaatttacaaccaattttctggattggactgatcagttcagtttgctgtgtgtttgctcaaacagatgaaaatagatgtttaaaagcaaatgccaaatcatgtggagaatgtatacaagcagggccaaattgtgggtggtgcacaaattcaacatttttacaggaaggaatgcctacttctgcacgatgtgatgatttagaagccttaaaaaagaagggttgccctccagatgacatagaaaatcccagaggctccaaagatataaagaaaaataaaaatgtaaccaaccgtagcaaaggaacagcagagaagctcaagccagaggatattactcagatccaaccacagcagttggttttgcgattaagatcaggggagccacagacatttacattaaaattcaagagagctgaagactatcccattgacctctactaccttatggacctgtcttactcaatgaaagacgatttggagaatgtaaaaagtcttggaacagatctgatgaatgaaatgaggaggattacttcggacttcagaattggatttggctcatttgtggaaaagactgtgatgccttacattagcacaacaccagctaagctcaggaacccttgcacaagtgaacagaactgcaccagcccatttagctacaaaaatgtgctcagtcttactaataaaggagaagtatttaatgaacttgttggaaaacagcgcatatctggaaatttggattctccagaaggtggtttcgatgccatcatgcaagttgcagtttgtggatcactgattggctggaggaatgttacacggctgctggtgttttccacagatgccgggtttcactttgctggagatgggaaacttggtggcattgttttaccaaatgatggacaatgtcacctggaaaataatatgtacacaatgagccattattatgattatccttctattgctcaccttgtccagaaactgagtgaaaataatattcagacaatttttgcagttactgaagaatttcagcctgtttacaaggagctgaaaaacttgatccctaagtcagcagtaggaacattatctgcaaattctagcaatgtaattcagttgatcattgatgcatacaattccctttcctcagaagtcattttggaaaacggcaaattgtcagaaggagtaacaataagttacaaatcttactgcaagaacggggtgaatggaacaggggaaaatggaagaaaatgttccaatatttccattggagatgaggttcaatttgaaattagcataacttcaaataagtgtccaaaaaaggattctgacagctttaaaattaggcctctgggctttacggaggaagtagaggttattcttcagtacatctgtgaatgtgaatgccaaagcgaaggcatccctgaaagtcccaagtgtcatgaaggaaatgggacatttgagtgtggcgcgtgcaggtgcaatgaagggcgtgttggtagacattgtgaatgcagcacagatgaagttaacagtgaagacatggatgcttactgcaggaaagaaaacagttcagaaatctgcagtaacaatggagagtgcgtctgcggacagtgtgtttgtaggaagagggataatacaaatgaaatttattctggcaaattctgcgagtgtgataatttcaactgtgatagatccaatggcttaatttgtggaggaaatggtgtttgcaagtgtcgtgtgtgtgagtgcaaccccaactacactggcagtgcatgtgactgttctttggatactagtacttgtgaagccagcaacggacagatctgcaatggccggggcatctgcgagtgtggtgtctgtaagtgtacagatccgaagtttcaagggcaaacgtgtgagatgtgtcagacctgccttggtgtctgtgctgagcataaagaatgtgttcagtgcagagccttcaataaaggagaaaagaaagacacatgcacacaggaatgttcctattttaacattaccaaggtagaaagtcgggacaaattaccccagccggtccaacctgatcctgtgtcccattgtaaggagaaggatgttgacgactgttggttctattttacgtattcagtgaatgggaacaacgaggtcatggttcatgttgtggagaatccagagtgtcccactggtccagacatcattccaattgtagctggtgtggttgctggaattgttcttattggccttgcattactgctgatatggaagcttttaatgataattcatgacagaagggagtttgctaaatttgaaaaggagaaaatgaatgccaaatgggacacgcctggagtgcagtggtgtgatatcagctcactgcaacctctgacttccagattccagcaattctcctgcctcagcctcccgagtacctgggattacagggtgaaaatcctatttataagagtgccgtaacaactgtggtcaatccgaagtatgagggaaaatgagtactgcccgtgcaaatcccacaacactgaatgcaaagtagcaatttccatagtcacagttaggtagctttagggcaatattgccatggttttactcatgtgcaggttttgaaaatgtacaatatgtataatttttaaaatgttttattattttgaaaataatgttgtaattcatgccagggactgacaaaagacttgagacaggatggttattcttgtcagctaaggtcacattgtgcctttttgaccttttcttcctggactattgaaatcaagcttattggattaagtgatatttctatagcgattgaaagggcaatagttaaagtaatgagcatgatgagagtttctgttaatcatgtattaaaactgatttttagctttacaaatatgtcagtttgcagttatgcagaatccaaagtaaatgtcctgctagctagttaaggattgttttaaatctgttattttgctatttgcctgttagacatgactgatgacatatctgaaagacaagtatgttgagagttgctggtgtaaaatacgtttgaaatagttgatctacaaaggccatgggaaaaattcagagagttaggaaggaaaaaccaatagctttaaaacctgtgtgccattttaagagttacttaatgtttggtaacttttatgccttcactttacaaattcaagccttagataaaagaaccgagcaattttctgctaaaaagtccttgatttagcactatttacatacaggccatactttacaaagtatttgctgaatggggaccttttgagttgaatttattttattatttttattttgtttaatgtctggtgctttctatcacctcttctaatcttttaatgtatttgtttgcaattttggggtaagactttttttatgagtactttttctttgaagttttagcggtcaatttgcctttttaatgaacatgtgaagttatactgtggctatgcaacagctctcacctacgcgagtcttactttgagttagtgccataacagaccactgtatgtttacttctcaccatttgagttgcccatcttgtttcacactagtcacattcttgttttaagtgcctttagttttaacagttcactttttacagtgctatttactgaagttatttattaaatatgcctaaaatacttaaatcggatgtcttgactctgatgtattttatcaggttgtgtgcatgaaatttttatagattaaagaagttgaggaaaagcattt

SEQ ID NO: 298 - DNA, 3876 bp, Homo sapiens
agccgccgccacccgccgcgcccgacacccgggaggccccgccagcccgcgggagaggcccagcgggagtcgcggaacagcaggcccgagcccaccgcgccgggccccggacgccgcgcggaaaagatgaatttacaaccaattttctggattggactgatcagttcagtttgctgtgtgtttgctcaaacagatgaaaatagatgtttaaaagcaaatgccaaatcatgtggagaatgtatacaagcagggccaaattgtgggtggtgcacaaattcaacatttttacaggaaggaatgcctacttctgcacgatgtgatgatttagaagccttaaaaaagaagggttgccctccagatgacatagaaaatcccagaggctccaaagatataaagaaaaataaaaatgtaaccaaccgtagcaaaggaacagcagagaagctcaagccagaggatattactcagatccaaccacagcagttggttttgcgattaagatcaggggagccacagacatttacattaaaattcaagagagctgaagactatcccattgacctctactaccttatggacctgtcttactcaatgaaagacgatttggagaatgtaaaaagtcttggaacagatctgatgaatgaaatgaggaggattacttcggacttcagaattggatttggctcatttgtggaaaagactgtgatgccttacattagcacaacaccagctaagctcaggaacccttgcacaagtgaacagaactgcaccagcccatttagctacaaaaatgtgctcagtcttactaataaaggagaagtatttaatgaacttgttggaaaacagcgcatatctggaaatttggattctccagaaggtggtttcgatgccatcatgcaagttgcagtttgtggatcactgattggctggaggaatgttacacggctgctggtgttttccacagatgccgggtttcactttgctggagatgggaaacttggtggcattgttttaccaaatgatggacaatgtcacctggaaaataatatgtacacaatgagccattattatgattatccttctattgctcaccttgtccagaaactgagtgaaaataatattcagacaatttttgcagttactgaagaatttcagcctgtttacaaggagctgaaaaacttgatccctaagtcagcagtaggaacattatctgcaaattctagcaatgtaattcagttgatcattgatgcatacaattccctttcctcagaagtcattttggaaaacggcaaattgtcagaaggagtaacaataagttacaaatcttactgcaagaacggggtgaatggaacaggggaaaatggaagaaaatgttccaatatttccattggagatgaggttcaatttgaaattagcataacttcaaataagtgtccaaaaaaggattctgacagctttaaaattaggcctctgggctttacggaggaagtagaggttattcttcagtacatctgtgaatgtgaatgccaaagcgaaggcatccctgaaagtcccaagtgtcatgaaggaaatgggacatttgagtgtggcgcgtgcaggtgcaatgaagggcgtgttggtagacattgtgaatgcagcacagatgaagttaacagtgaagacatggatgcttactgcaggaaagaaaacagttcagaaatctgcagtaacaatggagagtgcgtctgcggacagtgtgtttgtaggaagagggataatacaaatgaaatttattctggcaaattctgcgagtgtgataatttcaactgtgatagatccaatggcttaatttgtggaggaaatggtgtttgcaagtgtcgtgtgtgtgagtgcaaccccaactacactggcagtgcatgtgactgttctttggatactagtacttgtgaagccagcaacggacagatctgcaatggccggggcatctgcgagtgtggtgtctgtaagtgtacagatccgaagtttcaagggcaaacgtgtgagatgtgtcagacctgccttggtgtctgtgctgagcataaagaatgtgttcagtgcagagccttcaataaaggagaaaagaaagacacatgcacacaggaatgttcctattttaacattaccaaggtagaaagtcgggacaaattaccccagccggtccaacctgatcctgtgtcccattgtaaggagaaggatgttgacgactgttggttctattttacgtattcagtgaatgggaacaacgaggtcatggttcatgttgtggagaatccagagtgtcccactggtccagacatcattccaattgtagctggtgtggttgctggaattgttcttattggccttgcattactgctgatatggaagcttttaatgataattcatgacagaagggagtttgctaaatttgaaaaggagaaaatgaatgccaaatgggacacgcctggagtgcagtggtgtgatatcagctcactgcaacctctgacttccagattccagcaattctcctgcctcagcctcccgagtacctgggattacagggtgaaaatcctatttataagagtgccgtaacaactgtggtcaatccgaagtatgagggaaaatgagtactgcccgtgcaaatcccacaacactgaatgcaaagtagcaatttccatagtcacagttaggtagctttagggcaatattgccatggttttactcatgtgcaggttttgaaaatgtacaatatgtataatttttaaaatgttttattattttgaaaataatgttgtaattcatgccagggactgacaaaagacttgagacaggatggttattcttgtcagctaaggtcacattgtgcctttttgaccttttcttcctggactattgaaatcaagcttattggattaagtgatatttctatagcgattgaaagggcaatagttaaagtaatgagcatgatgagagtttctgttaatcatgtattaaaactgatttttagctttacaaatatgtcagtttgcagttatgcagaatccaaagtaaatgtcctgctagctagttaaggattgttttaaatctgttattttgctatttgcctgttagacatgactgatgacatatctgaaagacaagtatgttgagagttgctggtgtaaaatacgtttgaaatagttgatctacaaaggccatgggaaaaattcagagagttaggaaggaaaaaccaatagctttaaaacctgtgtgccattttaagagttacttaatgtttggtaacttttatgccttcactttacaaattcaagccttagataaaagaaccgagcaattttctgctaaaaagtccttgatttagcactatttacatacaggccatactttacaaagtatttgctgaatggggaccttttgagttgaatttattttattatttttattttgtttaatgtctggtgctttctatcacctcttctaatcttttaatgtatttgtttgcaattttggggtaagactttttttatgagtactttttctttgaagttttagcggtcaatttgcctttttaatgaacatgtgaagttatactgtggctatgcaacagctctcacctacgcgagtcttactttgagttagtgccataacagaccactgtatgtttacttctcaccatttgagttgcccatcttgtttcacactagtcacattcttgttttaagtgcctttagttttaacagttcactttttacagtgctatttactgaagttatttattaaatatgcctaaaatacttaaatcggatgtcttgactctgatgtattttatcaggttgtgtgcatgaaatttttatagattaaagaagttgaggaaaagcattt

SEQ ID NO: 299 - DNA, 3821 bp, Homo sapiens
agccgccgccacccgccgcgcccgacacccgggaggccccgccagcccgcgggagaggcccagcgggagtcgcggaacagcaggcccgagcccaccgcgccgggccccggacgccgcgcggaaaagatgaatttacaaccaattttctggattggactgatcagttcagtttgctgtgtgtttgctcaaacagatgaaaatagatgtttaaaagcaaatgccaaatcatgtggagaatgtatacaagcagggccaaattgtgggtggtgcacaaattcaacatttttacaggaaggaatgcctacttctgcacgatgtgatgatttagaagccttaaaaaagaagggttgccctccagatgacatagaaaatcccagaggctccaaagatataaagaaaaataaaaatgtaaccaaccgtagcaaaggaacagcagagaagctcaagccagaggatattactcagatccaaccacagcagttggttttgcgattaagatcaggggagccacagacatttacattaaaattcaagagagctgaagactatcccattgacctctactaccttatggacctgtcttactcaatgaaagacgatttggagaatgtaaaaagtcttggaacagatctgatgaatgaaatgaggaggattacttcggacttcagaattggatttggctcatttgtggaaaagactgtgatgccttacattagcacaacaccagctaagctcaggaacccttgcacaagtgaacagaactgcaccagcccatttagctacaaaaatgtgctcagtcttactaataaaggagaagtatttaatgaacttgttggaaaacagcgcatatctggaaatttggattctccagaaggtggtttcgatgccatcatgcaagttgcagtttgtggatcactgattggctggaggaatgttacacggctgctggtgttttccacagatgccgggtttcactttgctggagatgggaaacttggtggcattgttttaccaaatgatggacaatgtcacctggaaaataatatgtacacaatgagccattattatgattatccttctattgctcaccttgtccagaaactgagtgaaaataatattcagacaatttttgcagttactgaagaatttcagcctgtttacaaggagctgaaaaacttgatccctaagtcagcagtaggaacattatctgcaaattctagcaatgtaattcagttgatcattgatgcatacaattccctttcctcagaagtcattttggaaaacggcaaattgtcagaaggagtaacaataagttacaaatcttactgcaagaacggggtgaatggaacaggggaaaatggaagaaaatgttccaatatttccattggagatgaggttcaatttgaaattagcataacttcaaataagtgtccaaaaaaggattctgacagctttaaaattaggcctctgggctttacggaggaagtagaggttattcttcagtacatctgtgaatgtgaatgccaaagcgaaggcatccctgaaagtcccaagtgtcatgaaggaaatgggacatttgagtgtggcgcgtgcaggtgcaatgaagggcgtgttggtagacattgtgaatgcagcacagatgaagttaacagtgaagacatggatgcttactgcaggaaagaaaacagttcagaaatctgcagtaacaatggagagtgcgtctgcggacagtgtgtttgtaggaagagggataatacaaatgaaatttattctggcaaattctgcgagtgtgataatttcaactgtgatagatccaatggcttaatttgtggaggaaatggtgtttgcaagtgtcgtgtgtgtgagtgcaaccccaactacactggcagtgcatgtgactgttctttggatactagtacttgtgaagccagcaacggacagatctgcaatggccggggcatctgcgagtgtggtgtctgtaagtgtacagatccgaagtttcaagggcaaacgtgtgagatgtgtcagacctgccttggtgtctgtgctgagcataaagaatgtgttcagtgcagagccttcaataaaggagaaaagaaagacacatgcacacaggaatgttcctattttaacattaccaaggtagaaagtcgggacaaattaccccagccggtccaacctgatcctgtgtcccattgtaaggagaaggatgttgacgactgttggttctattttacgtattcagtgaatgggaacaacgaggtcatggttcatgttgtggagaatccagagtgtcccactggtccagacatcattccaattgtagctggtgtggttgctggaattgttcttattggccttgcattactgctgatatggaagcttttaatgataattcatgacagaagggagtttgctaaatttgaaaaggagaaaatgaatgccaaatgggacacgcctggagtgcagtggtgtgatatcagctcactgcaacctctgacttccagattccagcaattctcctgcctcagcctcccgagtacctgggattacagggtgaaaatcctatttataagagtgccgtaacaactgtggtcaatccgaagtatgagggaaaatgagtactgcccgtgcaaatcccacaacactgaatgcaaagtagcaatttccatagtcacagttaggtagctttagggcaatattgccatggttttactcatgtgcaggttttgaaaatgtacaatatgtataatttttaaaatgttttattattttgaaaataatgttgtaattcatgccagggactgacaaaagacttgagacaggatggttattcttgtcagctaaggtcacattgtgcctttttgaccttttcttcctggactattgaaatcaagcttattggattaagtgatatttctatagcgattgaaagggcaatagttaaagtaatgagcatgatgagagtttctgttaatcatgtattaaaactgatttttagctttacaaatatgtcagtttgcagttatgcagaatccaaagtaaatgtcctgctagctagttaaggattgttttaaatctgttattttgctatttgcctgttagacatgactgatgacatatctgaaagacaagtatgttgagagttgctggtgtaaaatacgtttgaaatagttgatctacaaaggccatgggaaaaattcagagagttaggaaggaaaaaccaatagctttaaaacctgtgtgccattttaagagttacttaatgtttggtaacttttatgccttcactttacaaattcaagccttagataaaagaaccgagcaattttctgttgctgaatggggaccttttgagttgaatttattttattatttttattttgtttaatgtctggtgctttctatcacctcttctaatcttttaatgtatttgtttgcaattttggggtaagactttttttatgagtactttttctttgaagttttagcggtcaatttgcctttttaatgaacatgtgaagttatactgtggctatgcaacagctctcacctacgcgagtcttactttgagttagtgccataacagaccactgtatgtttacttctcaccatttgagttgcccatcttgtttcacactagtcacattcttgttttaagtgcctttagttttaacagttcactttttacagtgctatttactgaagttatttattaaatatgcctaaaatacttaaatcggatgtcttgactctgatgtattttatcaggttgtgtgcatgaaatttttatagattaaagaagttgaggaaaagcattt

SEQ ID NO: 300 - DNA, 3768 bp, Homo sapiens
atgaatttacaaccaattttctggattggactgatcagttcagtttgctgtgtgtttgctcaaacagatgaaaatagatgtttaaaagcaaatgccaaatcatgtggagaatgtatacaagcagggccaaattgtgggtggtgcacaaattcaacatttttacaggaaggaatgcctacttctgcacgatgtgatgatttagaagccttaaaaaagaagggttgccctccagatgacatagaaaatcccagaggctccaaagatataaagaaaaataaaaatgtaaccaaccgtagcaaaggaacagcagagaagctcaagccagaggatattactcagatccaaccacagcagttggttttgcgattaagatcaggggagccacagacatttacattaaaattcaagagagctgaagactatcccattgacctctactaccttatggacctgtcttactcaatgaaagacgatttggagaatgtaaaaagtcttggaacagatctgatgaatgaaatgaggaggattacttcggacttcagaattggatttggctcatttgtggaaaagactgtgatgccttacattagcacaacaccagctaagctcaggaacccttgcacaagtgaacagaactgcaccagcccatttagctacaaaaatgtgctcagtcttactaataaaggagaagtatttaatgaacttgttggaaaacagcgcatatctggaaatttggattctccagaaggtggtttcgatgccatcatgcaagttgcagtttgtggatcactgattggctggaggaatgttacacggctgctggtgttttccacagatgccgggtttcactttgctggagatgggaaacttggtggcattgttttaccaaatgatggacaatgtcacctggaaaataatatgtacacaatgagccattattatgattatccttctattgctcaccttgtccagaaactgagtgaaaataatattcagacaatttttgcagttactgaagaatttcagcctgtttacaaggagctgaaaaacttgatccctaagtcagcagtaggaacattatctgcaaattctagcaatgtaattcagttgatcattgatgcatacaattccctttcctcagaagtcattttggaaaacggcaaattgtcagaaggagtaacaataagttacaaatcttactgcaagaacggggtgaatggaacaggggaaaatggaagaaaatgttccaatatttccattggagatgaggttcaatttgaaattagcataacttcaaataagtgtccaaaaaaggattctgacagctttaaaattaggcctctgggctttacggaggaagtagaggttattcttcagtacatctgtgaatgtgaatgccaaagcgaaggcatccctgaaagtcccaagtgtcatgaaggaaatgggacatttgagtgtggcgcgtgcaggtgcaatgaagggcgtgttggtagacattgtgaatgcagcacagatgaagttaacagtgaagacatggatgcttactgcaggaaagaaaacagttcagaaatctgcagtaacaatggagagtgcgtctgcggacagtgtgtttgtaggaagagggataatacaaatgaaatttattctggcaaattctgcgagtgtgataatttcaactgtgatagatccaatggcttaatttgtggaggaaatggtgtttgcaagtgtcgtgtgtgtgagtgcaaccccaactacactggcagtgcatgtgactgttctttggatactagtacttgtgaagccagcaacggacagatctgcaatggccggggcatctgcgagtgtggtgtctgtaagtgtacagatccgaagtttcaagggcaaacgtgtgagatgtgtcagacctgccttggtgtctgtgctgagcataaagaatgtgttcagtgcagagccttcaataaaggagaaaagaaagacacatgcacacaggaatgttcctattttaacattaccaaggtagaaagtcgggacaaattaccccagccggtccaacctgatcctgtgtcccattgtaaggagaaggatgttgacgactgttggttctattttacgtattcagtgaatgggaacaacgaggtcatggttcatgttgtggagaatccagagtgtcccactggtccagacatcattccaattgtagctggtgtggttgctggaattgttcttattggccttgcattactgctgatatggaagcttttaatgataattcatgacagaagggagtttgctaaatttgaaaaggagaaaatgaatgccaaatgggacacgtctctctctgtcgcccagcctggagtgcagtggtgtgatatcagctcactgcaacctctgacttccagattccagcaattctcctgcctcagcctcccgagtacctgggattacagggtgaaaatcctatttataagagtgccgtaacaactgtggtcaatccgaagtatgagggaaaatgagtactgcccgtgcaaatcccacaacactgaatgcaaagtagcaatttccatagtcacagttaggtagctttagggcaatattgccatggttttactcatgtgcaggttttgaaaatgtacaatatgtataatttttaaaatgttttattattttgaaaataatgttgtaattcatgccagggactgacaaaagacttgagacaggatggttattcttgtcagctaaggtcacattgtgcctttttgaccttttcttcctggactattgaaatcaagcttattggattaagtgatatttctatagcgattgaaagggcaatagttaaagtaatgagcatgatgagagtttctgttaatcatgtattaaaactgatttttagctttacaaatatgtcagtttgcagttatgcagaatccaaagtaaatgtcctgctagctagttaaggattgttttaaatctgttattttgctatttgcctgttagacatgactgatgacatatctgaaagacaagtatgttgagagttgctggtgtaaaatacgtttgaaatagttgatctacaaaggccatgggaaaaattcagagagttaggaaggaaaaaccaatagctttaaaacctgtgtgccattttaagagttacttaatgtttggtaacttttatgccttcactttacaaattcaagccttagataaaagaaccgagcaattttctgctaaaaagtccttgatttagcactatttacatacaggccatactttacaaagtatttgctgaatggggaccttttgagttgaatttattttattatttttattttgtttaatgtctggtgctttctatcacctcttctaatcttttaatgtatttgtttgcaattttggggtaagactttttttatgagtactttttctttgaagttttagcggtcaatttgcctttttaatgaacatgtgaagttatactgtggctatgcaacagctctcacctacgcgagtcttactttgagttagtgccataacagaccactgtatgtttacttctcaccatttgagttgcccatcttgtttcacactagtcacattcttgttttaagtgcctttagttttaacagttcactttttacagtgctatttactgaagttatttattaaatatgcctaaaatacttaaatcggatgtcttgactctgatgtattttatcaggttgtgtgcatgaaatttttatagattaaagaagttgaggaaaagcattt

SEQ ID NO: 301 - DNA, 3894 bp, Homo sapiens
agccgccgccacccgccgcgcccgacacccgggaggccccgccagcccgcgggagaggcccagcgggagtcgcggaacagcaggcccgagcccaccgcgccgggccccggacgccgcgcggaaaagatgaatttacaaccaattttctggattggactgatcagttcagtttgctgtgtgtttgctcaaacagatgaaaatagatgtttaaaagcaaatgccaaatcatgtggagaatgtatacaagcagggccaaattgtgggtggtgcacaaattcaacatttttacaggaaggaatgcctacttctgcacgatgtgatgatttagaagccttaaaaaagaagggttgccctccagatgacatagaaaatcccagaggctccaaagatataaagaaaaataaaaatgtaaccaaccgtagcaaaggaacagcagagaagctcaagccagaggatattactcagatccaaccacagcagttggttttgcgattaagatcaggggagccacagacatttacattaaaattcaagagagctgaagactatcccattgacctctactaccttatggacctgtcttactcaatgaaagacgatttggagaatgtaaaaagtcttggaacagatctgatgaatgaaatgaggaggattacttcggacttcagaattggatttggctcatttgtggaaaagactgtgatgccttacattagcacaacaccagctaagctcaggaacccttgcacaagtgaacagaactgcaccagcccatttagctacaaaaatgtgctcagtcttactaataaaggagaagtatttaatgaacttgttggaaaacagcgcatatctggaaatttggattctccagaaggtggtttcgatgccatcatgcaagttgcagtttgtggatcactgattggctggaggaatgttacacggctgctggtgttttccacagatgccgggtttcactttgctggagatgggaaacttggtggcattgttttaccaaatgatggacaatgtcacctggaaaataatatgtacacaatgagccattattatgattatccttctattgctcaccttgtccagaaactgagtgaaaataatattcagacaatttttgcagttactgaagaatttcagcctgtttacaaggagctgaaaaacttgatccctaagtcagcagtaggaacattatctgcaaattctagcaatgtaattcagttgatcattgatgcatacaattccctttcctcagaagtcattttggaaaacggcaaattgtcagaaggagtaacaataagttacaaatcttactgcaagaacggggtgaatggaacaggggaaaatggaagaaaatgttccaatatttccattggagatgaggttcaatttgaaattagcataacttcaaataagtgtccaaaaaaggattctgacagctttaaaattaggcctctgggctttacggaggaagtagaggttattcttcagtacatctgtgaatgtgaatgccaaagcgaaggcatccctgaaagtcccaagtgtcatgaaggaaatgggacatttgagtgtggcgcgtgcaggtgcaatgaagggcgtgttggtagacattgtgaatgcagcacagatgaagttaacagtgaagacatggatgcttactgcaggaaagaaaacagttcagaaatctgcagtaacaatggagagtgcgtctgcggacagtgtgtttgtaggaagagggataatacaaatgaaatttattctggcaaattctgcgagtgtgataatttcaactgtgatagatccaatggcttaatttgtggaggaaatggtgtttgcaagtgtcgtgtgtgtgagtgcaaccccaactacactggcagtgcatgtgactgttctttggatactagtacttgtgaagccagcaacggacagatctgcaatggccggggcatctgcgagtgtggtgtctgtaagtgtacagatccgaagtttcaagggcaaacgtgtgagatgtgtcagacctgccttggtgtctgtgctgagcataaagaatgtgttcagtgcagagccttcaataaaggagaaaagaaagacacatgcacacaggaatgttcctattttaacattaccaaggtagaaagtcgggacaaattaccccagccggtccaacctgatcctgtgtcccattgtaaggagaaggatgttgacgactgttggttctattttacgtattcagtgaatgggaacaacgaggtcatggttcatgttgtggagaatccagagtgtcccactggtccagacatcattccaattgtagctggtgtggttgctggaattgttcttattggccttgcattactgctgatatggaagcttttaatgataattcatgacagaagggagtttgctaaatttgaaaaggagaaaatgaatgccaaatgggacacgtctctctctgtcgcccagcctggagtgcagtggtgtgatatcagctcactgcaacctctgacttccagattccagcaattctcctgcctcagcctcccgagtacctgggattacagggtgaaaatcctatttataagagtgccgtaacaactgtggtcaatccgaagtatgagggaaaatgagtactgcccgtgcaaatcccacaacactgaatgcaaagtagcaatttccatagtcacagttaggtagctttagggcaatattgccatggttttactcatgtgcaggttttgaaaatgtacaatatgtataatttttaaaatgttttattattttgaaaataatgttgtaattcatgccagggactgacaaaagacttgagacaggatggttattcttgtcagctaaggtcacattgtgcctttttgaccttttcttcctggactattgaaatcaagcttattggattaagtgatatttctatagcgattgaaagggcaatagttaaagtaatgagcatgatgagagtttctgttaatcatgtattaaaactgatttttagctttacaaatatgtcagtttgcagttatgcagaatccaaagtaaatgtcctgctagctagttaaggattgttttaaatctgttattttgctatttgcctgttagacatgactgatgacatatctgaaagacaagtatgttgagagttgctggtgtaaaatacgtttgaaatagttgatctacaaaggccatgggaaaaattcagagagttaggaaggaaaaaccaatagctttaaaacctgtgtgccattttaagagttacttaatgtttggtaacttttatgccttcactttacaaattcaagccttagataaaagaaccgagcaattttctgctaaaaagtccttgatttagcactatttacatacaggccatactttacaaagtatttgctgaatggggaccttttgagttgaatttattttattatttttattttgtttaatgtctggtgctttctatcacctcttctaatcttttaatgtatttgtttgcaattttggggtaagactttttttatgagtactttttctttgaagttttagcggtcaatttgcctttttaatgaacatgtgaagttatactgtggctatgcaacagctctcacctacgcgagtcttactttgagttagtgccataacagaccactgtatgtttacttctcaccatttgagttgcccatcttgtttcacactagtcacattcttgttttaagtgcctttagttttaacagttcactttttacagtgctatttactgaagttatttattaaatatgcctaaaatacttaaatcggatgtcttgactctgatgtattttatcaggttgtgtgcatgaaatttttatagattaaagaagttgaggaaaagcattt

SEQ ID NO: 302 - DNA, 3839 bp, Homo sapiens
agccgccgccacccgccgcgcccgacacccgggaggccccgccagcccgcgggagaggcccagcgggagtcgcggaacagcaggcccgagcccaccgcgccgggccccggacgccgcgcggaaaagatgaatttacaaccaattttctggattggactgatcagttcagtttgctgtgtgtttgctcaaacagatgaaaatagatgtttaaaagcaaatgccaaatcatgtggagaatgtatacaagcagggccaaattgtgggtggtgcacaaattcaacatttttacaggaaggaatgcctacttctgcacgatgtgatgatttagaagccttaaaaaagaagggttgccctccagatgacatagaaaatcccagaggctccaaagatataaagaaaaataaaaatgtaaccaaccgtagcaaaggaacagcagagaagctcaagccagaggatattactcagatccaaccacagcagttggttttgcgattaagatcaggggagccacagacatttacattaaaattcaagagagctgaagactatcccattgacctctactaccttatggacctgtcttactcaatgaaagacgatttggagaatgtaaaaagtcttggaacagatctgatgaatgaaatgaggaggattacttcggacttcagaattggatttggctcatttgtggaaaagactgtgatgccttacattagcacaacaccagctaagctcaggaacccttgcacaagtgaacagaactgcaccagcccatttagctacaaaaatgtgctcagtcttactaataaaggagaagtatttaatgaacttgttggaaaacagcgcatatctggaaatttggattctccagaaggtggtttcgatgccatcatgcaagttgcagtttgtggatcactgattggctggaggaatgttacacggctgctggtgttttccacagatgccgggtttcactttgctggagatgggaaacttggtggcattgttttaccaaatgatggacaatgtcacctggaaaataatatgtacacaatgagccattattatgattatccttctattgctcaccttgtccagaaactgagtgaaaataatattcagacaatttttgcagttactgaagaatttcagcctgtttacaaggagctgaaaaacttgatccctaagtcagcagtaggaacattatctgcaaattctagcaatgtaattcagttgatcattgatgcatacaattccctttcctcagaagtcattttggaaaacggcaaattgtcagaaggagtaacaataagttacaaatcttactgcaagaacggggtgaatggaacaggggaaaatggaagaaaatgttccaatatttccattggagatgaggttcaatttgaaattagcataacttcaaataagtgtccaaaaaaggattctgacagctttaaaattaggcctctgggctttacggaggaagtagaggttattcttcagtacatctgtgaatgtgaatgccaaagcgaaggcatccctgaaagtcccaagtgtcatgaaggaaatgggacatttgagtgtggcgcgtgcaggtgcaatgaagggcgtgttggtagacattgtgaatgcagcacagatgaagttaacagtgaagacatggatgcttactgcaggaaagaaaacagttcagaaatctgcagtaacaatggagagtgcgtctgcggacagtgtgtttgtaggaagagggataatacaaatgaaatttattctggcaaattctgcgagtgtgataatttcaactgtgatagatccaatggcttaatttgtggaggaaatggtgtttgcaagtgtcgtgtgtgtgagtgcaaccccaactacactggcagtgcatgtgactgttctttggatactagtacttgtgaagccagcaacggacagatctgcaatggccggggcatctgcgagtgtggtgtctgtaagtgtacagatccgaagtttcaagggcaaacgtgtgagatgtgtcagacctgccttggtgtctgtgctgagcataaagaatgtgttcagtgcagagccttcaataaaggagaaaagaaagacacatgcacacaggaatgttcctattttaacattaccaaggtagaaagtcgggacaaattaccccagccggtccaacctgatcctgtgtcccattgtaaggagaaggatgttgacgactgttggttctattttacgtattcagtgaatgggaacaacgaggtcatggttcatgttgtggagaatccagagtgtcccactggtccagacatcattccaattgtagctggtgtggttgctggaattgttcttattggccttgcattactgctgatatggaagcttttaatgataattcatgacagaagggagtttgctaaatttgaaaaggagaaaatgaatgccaaatgggacacgtctctctctgtcgcccagcctggagtgcagtggtgtgatatcagctcactgcaacctctgacttccagattccagcaattctcctgcctcagcctcccgagtacctgggattacagggtgaaaatcctatttataagagtgccgtaacaactgtggtcaatccgaagtatgagggaaaatgagtactgcccgtgcaaatcccacaacactgaatgcaaagtagcaatttccatagtcacagttaggtagctttagggcaatattgccatggttttactcatgtgcaggttttgaaaatgtacaatatgtataatttttaaaatgttttattattttgaaaataatgttgtaattcatgccagggactgacaaaagacttgagacaggatggttattcttgtcagctaaggtcacattgtgcctttttgaccttttcttcctggactattgaaatcaagcttattggattaagtgatatttctatagcgattgaaagggcaatagttaaagtaatgagcatgatgagagtttctgttaatcatgtattaaaactgatttttagctttacaaatatgtcagtttgcagttatgcagaatccaaagtaaatgtcctgctagctagttaaggattgttttaaatctgttattttgctatttgcctgttagacatgactgatgacatatctgaaagacaagtatgttgagagttgctggtgtaaaatacgtttgaaatagttgatctacaaaggccatgggaaaaattcagagagttaggaaggaaaaaccaatagctttaaaacctgtgtgccattttaagagttacttaatgtttggtaacttttatgccttcactttacaaattcaagccttagataaaagaaccgagcaattttctgttgctgaatggggaccttttgagttgaatttattttattatttttattttgtttaatgtctggtgctttctatcacctcttctaatcttttaatgtatttgtttgcaattttggggtaagactttttttatgagtactttttctttgaagttttagcggtcaatttgcctttttaatgaacatgtgaagttatactgtggctatgcaacagctctcacctacgcgagtcttactttgagttagtgccataacagaccactgtatgtttacttctcaccatttgagttgcccatcttgtttcacactagtcacattcttgttttaagtgcctttagttttaacagttcactttttacagtgctatttactgaagttatttattaaatatgcctaaaatacttaaatcggatgtcttgactctgatgtattttatcaggttgtgtgcatgaaatttttatagattaaagaagttgaggaaaagcattt

SEQ ID NO: 303 - DNA, 3788 bp, Homo sapiens
gagccagcccagccgcgttccgaacgtgagggtcgccggcctgggcgctgtcacgtcggggctgccggagctgcgggggaccgggcccgaacggcccctgacacctgcggtctcccgccgggctgggcaagcgcagatgaatttacaaccaattttctggattggactgatcagttcagtttgctgtgtgtttgctcaaacagatgaaaatagatgtttaaaagcaaatgccaaatcatgtggagaatgtatacaagcagggccaaattgtgggtggtgcacaaattcaacatttttacaggaaggaatgcctacttctgcacgatgtgatgatttagaagccttaaaaaagaagggttgccctccagatgacatagaaaatcccagaggctccaaagatataaagaaaaataaaaatgtaaccaaccgtagcaaaggaacagcagagaagctcaagccagaggatattactcagatccaaccacagcagttggttttgcgattaagatcaggggagccacagacatttacattaaaattcaagagagctgaagactatcccattgacctctactaccttatggacctgtcttactcaatgaaagacgatttggagaatgtaaaaagtcttggaacagatctgatgaatgaaatgaggaggattacttcggacttcagaattggatttggctcatttgtggaaaagactgtgatgccttacattagcacaacaccagctaagctcaggaacccttgcacaagtgaacagaactgcaccagcccatttagctacaaaaatgtgctcagtcttactaataaaggagaagtatttaatgaacttgttggaaaacagcgcatatctggaaatttggattctccagaaggtggtttcgatgccatcatgcaagttgcagtttgtggatcactgattggctggaggaatgttacacggctgctggtgttttccacagatgccgggtttcactttgctggagatgggaaacttggtggcattgttttaccaaatgatggacaatgtcacctggaaaataatatgtacacaatgagccattattatgattatccttctattgctcaccttgtccagaaactgagtgaaaataatattcagacaatttttgcagttactgaagaatttcagcctgtttacaaggagctgaaaaacttgatccctaagtcagcagtaggaacattatctgcaaattctagcaatgtaattcagttgatcattgatgcatacaattccctttcctcagaagtcattttggaaaacggcaaattgtcagaaggagtaacaataagttacaaatcttactgcaagaacggggtgaatggaacaggggaaaatggaagaaaatgttccaatatttccattggagatgaggttcaatttgaaattagcataacttcaaataagtgtccaaaaaaggattctgacagctttaaaattaggcctctgggctttacggaggaagtagaggttattcttcagtacatctgtgaatgtgaatgccaaagcgaaggcatccctgaaagtcccaagtgtcatgaaggaaatgggacatttgagtgtggcgcgtgcaggtgcaatgaagggcgtgttggtagacattgtgaatgcagcacagatgaagttaacagtgaagacatggatgcttactgcaggaaagaaaacagttcagaaatctgcagtaacaatggagagtgcgtctgcggacagtgtgtttgtaggaagagggataatacaaatgaaatttattctggcaaattctgcgagtgtgataatttcaactgtgatagatccaatggcttaatttgtggaggaaatggtgtttgcaagtgtcgtgtgtgtgagtgcaaccccaactacactggcagtgcatgtgactgttctttggatactagtacttgtgaagccagcaacggacagatctgcaatggccggggcatctgcgagtgtggtgtctgtaagtgtacagatccgaagtttcaagggcaaacgtgtgagatgtgtcagacctgccttggtgtctgtgctgagcataaagaatgtgttcagtgcagagccttcaataaaggagaaaagaaagacacatgcacacaggaatgttcctattttaacattaccaaggtagaaagtcgggacaaattaccccagccggtccaacctgatcctgtgtcccattgtaaggagaaggatgttgacgactgttggttctattttacgtattcagtgaatgggaacaacgaggtcatggttcatgttgtggagaatccagagtgtcccactggtccagacatcattccaattgtagctggtgtggttgctggaattgttcttattggccttgcattactgctgatatggaagcttttaatgataattcatgacagaagggagtttgctaaatttgaaaaggagaaaatgaatgccaaatgggacacgggtgaaaatcctatttataagagtgccgtaacaactgtggtcaatccgaagtatgagggaaaatgagtactgcccgtgcaaatcccacaacactgaatgcaaagtagcaatttccatagtcacagttaggtagctttagggcaatattgccatggttttactcatgtgcaggttttgaaaatgtacaatatgtataatttttaaaatgttttattattttgaaaataatgttgtaattcatgccagggactgacaaaagacttgagacaggatggttattcttgtcagctaaggtcacattgtgcctttttgaccttttcttcctggactattgaaatcaagcttattggattaagtgatatttctatagcgattgaaagggcaatagttaaagtaatgagcatgatgagagtttctgttaatcatgtattaaaactgatttttagctttacaaatatgtcagtttgcagttatgcagaatccaaagtaaatgtcctgctagctagttaaggattgttttaaatctgttattttgctatttgcctgttagacatgactgatgacatatctgaaagacaagtatgttgagagttgctggtgtaaaatacgtttgaaatagttgatctacaaaggccatgggaaaaattcagagagttaggaaggaaaaaccaatagctttaaaacctgtgtgccattttaagagttacttaatgtttggtaacttttatgccttcactttacaaattcaagccttagataaaagaaccgagcaattttctgctaaaaagtccttgatttagcactatttacatacaggccatactttacaaagtatttgctgaatggggaccttttgagttgaatttattttattatttttattttgtttaatgtctggtgctttctatcacctcttctaatcttttaatgtatttgtttgcaattttggggtaagactttttttatgagtactttttctttgaagttttagcggtcaatttgcctttttaatgaacatgtgaagttatactgtggctatgcaacagctctcacctacgcgagtcttactttgagttagtgccataacagaccactgtatgtttacttctcaccatttgagttgcccatcttgtttcacactagtcacattcttgttttaagtgcctttagttttaacagttcactttttacagtgctatttactgaagttatttattaaatatgcctaaaatacttaaatcggatgtcttgactctgatgtattttatcaggttgtgtgcatgaaatttttatagattaaagaagttgaggaaaagcattt

SEQ ID NO: 304 - DNA, 3778 bp, Homo sapiens
agccgccgccacccgccgcgcccgacacccgggaggccccgccagcccgcgggagaggcccagcgggagtcgcggaacagcaggcccgagcccaccgcgccgggccccggacgccgcgcggaaaagatgaatttacaaccaattttctggattggactgatcagttcagtttgctgtgtgtttgctcaaacagatgaaaatagatgtttaaaagcaaatgccaaatcatgtggagaatgtatacaagcagggccaaattgtgggtggtgcacaaattcaacatttttacaggaaggaatgcctacttctgcacgatgtgatgatttagaagccttaaaaaagaagggttgccctccagatgacatagaaaatcccagaggctccaaagatataaagaaaaataaaaatgtaaccaaccgtagcaaaggaacagcagagaagctcaagccagaggatattactcagatccaaccacagcagttggttttgcgattaagatcaggggagccacagacatttacattaaaattcaagagagctgaagactatcccattgacctctactaccttatggacctgtcttactcaatgaaagacgatttggagaatgtaaaaagtcttggaacagatctgatgaatgaaatgaggaggattacttcggacttcagaattggatttggctcatttgtggaaaagactgtgatgccttacattagcacaacaccagctaagctcaggaacccttgcacaagtgaacagaactgcaccagcccatttagctacaaaaatgtgctcagtcttactaataaaggagaagtatttaatgaacttgttggaaaacagcgcatatctggaaatttggattctccagaaggtggtttcgatgccatcatgcaagttgcagtttgtggatcactgattggctggaggaatgttacacggctgctggtgttttccacagatgccgggtttcactttgctggagatgggaaacttggtggcattgttttaccaaatgatggacaatgtcacctggaaaataatatgtacacaatgagccattattatgattatccttctattgctcaccttgtccagaaactgagtgaaaataatattcagacaatttttgcagttactgaagaatttcagcctgtttacaaggagctgaaaaacttgatccctaagtcagcagtaggaacattatctgcaaattctagcaatgtaattcagttgatcattgatgcatacaattccctttcctcagaagtcattttggaaaacggcaaattgtcagaaggagtaacaataagttacaaatcttactgcaagaacggggtgaatggaacaggggaaaatggaagaaaatgttccaatatttccattggagatgaggttcaatttgaaattagcataacttcaaataagtgtccaaaaaaggattctgacagctttaaaattaggcctctgggctttacggaggaagtagaggttattcttcagtacatctgtgaatgtgaatgccaaagcgaaggcatccctgaaagtcccaagtgtcatgaaggaaatgggacatttgagtgtggcgcgtgcaggtgcaatgaagggcgtgttggtagacattgtgaatgcagcacagatgaagttaacagtgaagacatggatgcttactgcaggaaagaaaacagttcagaaatctgcagtaacaatggagagtgcgtctgcggacagtgtgtttgtaggaagagggataatacaaatgaaatttattctggcaaattctgcgagtgtgataatttcaactgtgatagatccaatggcttaatttgtggaggaaatggtgtttgcaagtgtcgtgtgtgtgagtgcaaccccaactacactggcagtgcatgtgactgttctttggatactagtacttgtgaagccagcaacggacagatctgcaatggccggggcatctgcgagtgtggtgtctgtaagtgtacagatccgaagtttcaagggcaaacgtgtgagatgtgtcagacctgccttggtgtctgtgctgagcataaagaatgtgttcagtgcagagccttcaataaaggagaaaagaaagacacatgcacacaggaatgttcctattttaacattaccaaggtagaaagtcgggacaaattaccccagccggtccaacctgatcctgtgtcccattgtaaggagaaggatgttgacgactgttggttctattttacgtattcagtgaatgggaacaacgaggtcatggttcatgttgtggagaatccagagtgtcccactggtccagacatcattccaattgtagctggtgtggttgctggaattgttcttattggccttgcattactgctgatatggaagcttttaatgataattcatgacagaagggagtttgctaaatttgaaaaggagaaaatgaatgccaaatgggacacgggtgaaaatcctatttataagagtgccgtaacaactgtggtcaatccgaagtatgagggaaaatgagtactgcccgtgcaaatcccacaacactgaatgcaaagtagcaatttccatagtcacagttaggtagctttagggcaatattgccatggttttactcatgtgcaggttttgaaaatgtacaatatgtataatttttaaaatgttttattattttgaaaataatgttgtaattcatgccagggactgacaaaagacttgagacaggatggttattcttgtcagctaaggtcacattgtgcctttttgaccttttcttcctggactattgaaatcaagcttattggattaagtgatatttctatagcgattgaaagggcaatagttaaagtaatgagcatgatgagagtttctgttaatcatgtattaaaactgatttttagctttacaaatatgtcagtttgcagttatgcagaatccaaagtaaatgtcctgctagctagttaaggattgttttaaatctgttattttgctatttgcctgttagacatgactgatgacatatctgaaagacaagtatgttgagagttgctggtgtaaaatacgtttgaaatagttgatctacaaaggccatgggaaaaattcagagagttaggaaggaaaaaccaatagctttaaaacctgtgtgccattttaagagttacttaatgtttggtaacttttatgccttcactttacaaattcaagccttagataaaagaaccgagcaattttctgctaaaaagtccttgatttagcactatttacatacaggccatactttacaaagtatttgctgaatggggaccttttgagttgaatttattttattatttttattttgtttaatgtctggtgctttctatcacctcttctaatcttttaatgtatttgtttgcaattttggggtaagactttttttatgagtactttttctttgaagttttagcggtcaatttgcctttttaatgaacatgtgaagttatactgtggctatgcaacagctctcacctacgcgagtcttactttgagttagtgccataacagaccactgtatgtttacttctcaccatttgagttgcccatcttgtttcacactagtcacattcttgttttaagtgcctttagttttaacagttcactttttacagtgctatttactgaagttatttattaaatatgcctaaaatacttaaatcggatgtcttgactctgatgtattttatcaggttgtgtgcatgaaatttttatagattaaagaagttgaggaaaagcattt

SEQ ID NO: 305 - DNA, 3405 bp, Homo sapiens
cagtttgatgtactaaaggcttctcgattgggagacaggaaacctgggtgtcagtgccgggtctgccactgaatttctgtgtgacctttgtcagagtactgtacttccagagcgttggtttccacatctaccctataaagcagcctgcatgtttctctcattctctcgttcgaggagttggaggatagctgctgcctgatatgaatttacaaccaattttctggattggactgatcagttcagtttgctgtgtgtttgctcaaacagatgaaaatagatgtttaaaagcaaatgccaaatcatgtggagaatgtatacaagcagggccaaattgtgggtggtgcacaaattcaacatttttacaggaaggaatgcctacttctgcacgatgtgatgatttagaagccttaaaaaagaagggttgccctccagatgacatagaaaatcccagaggctccaaagatataaagaaaaataaaaatgtaaccaaccgtagcaaaggaacagcagagaagctcaagccagaggatattactcagatccaaccacagcagttggttttgcgattaagatcaggggagccacagacatttacattaaaattcaagagagctgaagactatcccattgacctctactaccttatggacctgtcttactcaatgaaagacgatttggagaatgtaaaaagtcttggaacagatctgatgaatgaaatgaggaggattacttcggacttcagaattggatttggctcatttgtggaaaagactgtgatgccttacattagcacaacaccagctaagctcaggaacccttgcacaagtgaacagaactgcaccagcccatttagctacaaaaatgtgctcagtcttactaataaaggagaagtatttaatgaacttgttggaaaacagcgcatatctggaaatttggattctccagaaggtggtttcgatgccatcatgcaagttgcagtttgtggatcactgattggctggaggaatgttacacggctgctggtgttttccacagatgccgggtttcactttgctggagatgggaaacttggtggcattgttttaccaaatgatggacaatgtcacctggaaaataatatgtacacaatgagccattattatgattatccttctattgctcaccttgtccagaaactgagtgaaaataatattcagacaatttttgcagttactgaagaatttcagcctgtttacaaggagctgaaaaacttgatccctaagtcagcagtaggaacattatctgcaaattctagcaatgtaattcagttgatcattgatgcatacaattccctttcctcagaagtcattttggaaaacggcaaattgtcagaaggagtaacaataagttacaaatcttactgcaagaacggggtgaatggaacaggggaaaatggaagaaaatgttccaatatttccattggagatgaggttcaatttgaaattagcataacttcaaataagtgtccaaaaaaggattctgacagctttaaaattaggcctctgggctttacggaggaagtagaggttattcttcagtacatctgtgaatgtgaatgccaaagcgaaggcatccctgaaagtcccaagtgtcatgaaggaaatgggacatttgagtgtggcgcgtgcaggtgcaatgaagggcgtgttggtagacattgtgaatgcagcacagatgaagttaacagtgaagacatggatgcttactgcaggaaagaaaacagttcagaaatctgcagtaacaatggagagtgcgtctgcggacagtgtgtttgtaggaagagggataatacaaatgaaatttattctggcaaattctgcgagtgtgataatttcaactgtgatagatccaatggcttaatttgtggaggaaatggtgtttgcaagtgtcgtgtgtgtgagtgcaaccccaactacactggcagtgcatgtgactgttctttggatactagtacttgtgaagccagcaacggacagatctgcaatggccggggcatctgcgagtgtggtgtctgtaagtgtacagatccgaagtttcaagggcaaacgtgtgagatgtgtcagacctgccttggtgtctgtgctgagcataaagaatgtgttcagtgcagagccttcaataaaggagaaaagaaagacacatgcacacaggaatgttcctattttaacattaccaaggtagaaagtcgggacaaattaccccagccggtccaacctgatcctgtgtcccattgtaaggagaaggatgttgacgactgttggttctattttacgtattcagtgaatgggaacaacgaggtcatggttcatgttgtggagaatccagagtgtcccactggtccagacatcattccaattgtagctggtgtggttgctggaattgttcttattggccttgcattactgctgatatggaagcttttaatgataattcatgacagaagggagtttgctaaatttgaaaaggagaaaatgaatgccaaatgggacacgggtgaaaatcctatttataagagtgccgtaacaactgtggtcaatccgaagtatgagggaaaatgagtactgcccgtgcaaatcccacaacactgaatgcaaaacatgactgatgacatatctgaaagacaagtatgttgagagttgctggtgtaaaatacgtttgaaatagttgatctacaaaggccatgggaaaaattcagagagttaggaaggaaaaaccaatagctttaaaacctgtgtgccattttaagagttacttaatgtttggtaacttttatgccttcactttacaaattcaagccttagataaaagaaccgagcaattttctgctaaaaagtccttgatttagcactatttacatacaggccatactttacaaagtatttgctgaatggggaccttttgagttgaatttattttattatttttattttgtttaatgtctggtgctttctatcacctcttctaatcttttaatgtatttgtttgcaattttggggtaagactttttttatgagtactttttctttgaagttttagcggtcaatttgcctttttaatgaacatgtgaagttatactgtggctatgcaacagctctcacctacgcgagtcttactttgagttagtgccataacagaccactgtatgtttacttctcaccatttgagttgcccatcttgtttcacactagtcacattcttgttttaagtgcctttagttttaacagttcactttttacagtgctatttactgaagttatttattaaatatgcctaaaatacttaaatcggatgtcttgactctgatgtattttatcaggttgtgtgcatgaaatttttatagattaaagaagttgaggaaaagcattt

SEQ ID NO: 306 - DNA, 3852 bp, Homo sapiens
cagtttgatgtactaaaggcttctcgattgggagacaggaaacctgggtgtcagtgccgggtctgccactgaatttctgtgtgacctttgtcagagtactgtacttccagagcgttggtttccacatctaccctataaagcagcctgcatgtttctctcattctctcgttcgaggagttggaggatagctgctgcctgatatgaatttacaaccaattttctggattggactgatcagttcagtttgctgtgtgtttgctcaaacagatgaaaatagatgtttaaaagcaaatgccaaatcatgtggagaatgtatacaagcagggccaaattgtgggtggtgcacaaattcaacatttttacaggaaggaatgcctacttctgcacgatgtgatgatttagaagccttaaaaaagaagggttgccctccagatgacatagaaaatcccagaggctccaaagatataaagaaaaataaaaatgtaaccaaccgtagcaaaggaacagcagagaagctcaagccagaggatattactcagatccaaccacagcagttggttttgcgattaagatcaggggagccacagacatttacattaaaattcaagagagctgaagactatcccattgacctctactaccttatggacctgtcttactcaatgaaagacgatttggagaatgtaaaaagtcttggaacagatctgatgaatgaaatgaggaggattacttcggacttcagaattggatttggctcatttgtggaaaagactgtgatgccttacattagcacaacaccagctaagctcaggaacccttgcacaagtgaacagaactgcaccagcccatttagctacaaaaatgtgctcagtcttactaataaaggagaagtatttaatgaacttgttggaaaacagcgcatatctggaaatttggattctccagaaggtggtttcgatgccatcatgcaagttgcagtttgtggatcactgattggctggaggaatgttacacggctgctggtgttttccacagatgccgggtttcactttgctggagatgggaaacttggtggcattgttttaccaaatgatggacaatgtcacctggaaaataatatgtacacaatgagccattattatgattatccttctattgctcaccttgtccagaaactgagtgaaaataatattcagacaatttttgcagttactgaagaatttcagcctgtttacaaggagctgaaaaacttgatccctaagtcagcagtaggaacattatctgcaaattctagcaatgtaattcagttgatcattgatgcatacaattccctttcctcagaagtcattttggaaaacggcaaattgtcagaaggagtaacaataagttacaaatcttactgcaagaacggggtgaatggaacaggggaaaatggaagaaaatgttccaatatttccattggagatgaggttcaatttgaaattagcataacttcaaataagtgtccaaaaaaggattctgacagctttaaaattaggcctctgggctttacggaggaagtagaggttattcttcagtacatctgtgaatgtgaatgccaaagcgaaggcatccctgaaagtcccaagtgtcatgaaggaaatgggacatttgagtgtggcgcgtgcaggtgcaatgaagggcgtgttggtagacattgtgaatgcagcacagatgaagttaacagtgaagacatggatgcttactgcaggaaagaaaacagttcagaaatctgcagtaacaatggagagtgcgtctgcggacagtgtgtttgtaggaagagggataatacaaatgaaatttattctggcaaattctgcgagtgtgataatttcaactgtgatagatccaatggcttaatttgtggaggaaatggtgtttgcaagtgtcgtgtgtgtgagtgcaaccccaactacactggcagtgcatgtgactgttctttggatactagtacttgtgaagccagcaacggacagatctgcaatggccggggcatctgcgagtgtggtgtctgtaagtgtacagatccgaagtttcaagggcaaacgtgtgagatgtgtcagacctgccttggtgtctgtgctgagcataaagaatgtgttcagtgcagagccttcaataaaggagaaaagaaagacacatgcacacaggaatgttcctattttaacattaccaaggtagaaagtcgggacaaattaccccagccggtccaacctgatcctgtgtcccattgtaaggagaaggatgttgacgactgttggttctattttacgtattcagtgaatgggaacaacgaggtcatggttcatgttgtggagaatccagagtgtcccactggtccagacatcattccaattgtagctggtgtggttgctggaattgttcttattggccttgcattactgctgatatggaagcttttaatgataattcatgacagaagggagtttgctaaatttgaaaaggagaaaatgaatgccaaatgggacacgggtgaaaatcctatttataagagtgccgtaacaactgtggtcaatccgaagtatgagggaaaatgagtactgcccgtgcaaatcccacaacactgaatgcaaagtagcaatttccatagtcacagttaggtagctttagggcaatattgccatggttttactcatgtgcaggttttgaaaatgtacaatatgtataatttttaaaatgttttattattttgaaaataatgttgtaattcatgccagggactgacaaaagacttgagacaggatggttattcttgtcagctaaggtcacattgtgcctttttgaccttttcttcctggactattgaaatcaagcttattggattaagtgatatttctatagcgattgaaagggcaatagttaaagtaatgagcatgatgagagtttctgttaatcatgtattaaaactgatttttagctttacaaatatgtcagtttgcagttatgcagaatccaaagtaaatgtcctgctagctagttaaggattgttttaaatctgttattttgctatttgcctgttagacatgactgatgacatatctgaaagacaagtatgttgagagttgctggtgtaaaatacgtttgaaatagttgatctacaaaggccatgggaaaaattcagagagttaggaaggaaaaaccaatagctttaaaacctgtgtgccattttaagagttacttaatgtttggtaacttttatgccttcactttacaaattcaagccttagataaaagaaccgagcaattttctgctaaaaagtccttgatttagcactatttacatacaggccatactttacaaagtatttgctgaatggggaccttttgagttgaatttattttattatttttattttgtttaatgtctggtgctttctatcacctcttctaatcttttaatgtatttgtttgcaattttggggtaagactttttttatgagtactttttctttgaagttttagcggtcaatttgcctttttaatgaacatgtgaagttatactgtggctatgcaacagctctcacctacgcgagtcttactttgagttagtgccataacagaccactgtatgtttacttctcaccatttgagttgcccatcttgtttcacactagtcacattcttgttttaagtgcctttagttttaacagttcactttttacagtgctatttactgaagttatttattaaatatgcctaaaatacttaaatcggatgtcttgactctgatgtattttatcaggttgtgtgcatgaaatttttatagattaaagaagttgaggaaaagcattt

SEQ ID NO: 307 - DNA, 3670 bp, Homo sapiens
agccgccgccacccgccgcgcccgacacccgggaggccccgccagcccgcgggagaggcccagcgggagtcgcggaacagcaggcccgagcccaccgcgccgggccccggacgccgcgcggaaaagatgaatttacaaccaattttctggattggactgatcagttcagtttgctgtgtgtttgctcaaacagatgaaaatagatgtttaaaagcaaatgccaaatcatgtggagaatgtatacaagcagggccaaattgtgggtggtgcacaaattcaacatttttacaggaaggaatgcctacttctgcacgatgtgatgatttagaagccttaaaaaagaagggttgccctccagatgacatagaaaatcccagaggctccaaagatataaagaaaaataaaaatgtaaccaaccgtagcaaaggaacagcagagaagctcaagccagaggatattactcagatccaaccacagcagttggttttgcgattaagatcaggggagccacagacatttacattaaaattcaagagagctgaagactatcccattgacctctactaccttatggacctgtcttactcaatgaaagacgatttggagaatgtaaaaagtcttggaacagatctgatgaatgaaatgaggaggattacttcggacttcagaattggatttggctcatttgtggaaaagactgtgatgccttacattagcacaacaccagctaagctcaggaacccttgcacaagtgaacagaactgcaccagcccatttagctacaaaaatgtgctcagtcttactaataaaggagaagtatttaatgaacttgttggaaaacagcgcatatctggaaatttggattctccagaaggtggtttcgatgccatcatgcaagttgcagtttgtggatcactgattggctggaggaatgttacacggctgctggtgttttccacagatgccgggtttcactttgctggagatgggaaacttggtggcattgttttaccaaatgatggacaatgtcacctggaaaataatatgtacacaatgagccattattatgattatccttctattgctcaccttgtccagaaactgagtgaaaataatattcagacaatttttgcagttactgaagaatttcagcctgtttacaaggagctgaaaaacttgatccctaagtcagcagtaggaacattatctgcaaattctagcaatgtaattcagttgatcattgatgcatacaattccctttcctcagaagtcattttggaaaacggcaaattgtcagaaggagtaacaataagttacaaatcttactgcaagaacggggtgaatggaacaggggaaaatggaagaaaatgttccaatatttccattggagatgaggttcaatttgaaattagcataacttcaaataagtgtccaaaaaaggattctgacagctttaaaattaggcctctgggctttacggaggaagtagaggttattcttcagtacatctgtgaatgtgaatgccaaagcgaaggcatccctgaaagtcccaagtgtcatgaaggaaatgggacatttgagtgtggcgcgtgcaggtgcaatgaagggcgtgttggtagacattgtgaatgcagcacagatgaagttaacagtgaagacatggatgcttactgcaggaaagaaaacagttcagaaatctgcagtaacaatggagagtgcgtctgcggacagtgtgtttgtaggaagagggataatacaaatgaaatttattctggcaaattctgcgagtgtgataatttcaactgtgatagatccaatggcttaatttgtggaggaaatggtgtttgcaagtgtcgtgtgtgtgagtgcaaccccaactacactggcagtgcatgtgactgttctttggatactagtacttgtgaagccagcaacggacagatctgcaatggccggggcatctgcgagtgtggtgtctgtaagtgtacagatccgaagtttcaagggcaaacgtgtgagatgtgtcagacctgccttggtgtctgtgctgagcataaagaatgtgttcagtgcagagccttcaataaaggagaaaagaaagacacatgcacacaggaatgttcctattttaacattaccaaggtagaaagtcgggacaaattaccccagccggtccaacctgatcctgtgtcccattgtaaggagaaggatgttgacgactgttggttctattttacgtattcagtgaatgggaacaacgaggtcatggttcatgttgtggagaatccagagtgtcccactggtccagacatcattccaattgtagctggtgtggttgctggaattgttcttattggccttgcattactgctgatatggaagcttttaatgataattcatgacagaagggagtttgctaaatttgaaaaggagaaaatgaatgccaaatgggacacgggtgaaaatcctatttataagagtgccgtaacaactgtggtcaatccgaagtatgagggaaaatgagtactgcccgtgcaaatcccacaacactgaatgcaaagtagcaatttccatagtcacagttaggtagctttagggcaatattgccatggttttactcatgtgcaggttttgaaaatgtacaatatgtataatttttaaaatgttttattattttgaaaataatgttgtaattcatgccagggatgcctttttgaccttttcttcctggactattgaaatcaagcttattggattaagtgatatttctatagcgattgaaagggcaatagttaaagtaatgagcatgatgagagtttctgttaatcatgtattaaaactgatttttagctttacaaatatgtcagtttgcagttatgcagaatccaaagtaaatgtcctgctagctagttaaggattgttttaaatctgttattttgctatttgcctgttagacatgactgatgacatatctgaaagacaagtatgttgagagttgctggtgtaaaatacgtttgaaatagttgatctacaaaggccatgggaaaaattcagagagttaggaaggaaaaaccaatagctttaaaacctgtgtgccattttaagagttacttaatgtttggtaacttttatgccttcactttacaaattcaagccttagataaaagaaccgagcaattttctgttgctgaatggggaccttttgagttgaatttattttattatttttattttgtttaatgtctggtgctttctatcacctcttctaatcttttaatgtatttgtttgcaattttggggtaagactttttttatgagtactttttctttgaagttttagcggtcaatttgcctttttaatgaacatgtgaagttatactgtggctatgcaacagctctcacctacgcgagtcttactttgagttagtgccataacagaccactgtatgtttacttctcaccatttgagttgcccatcttgtttcacactagtcacattcttgttttaagtgcctttagttttaacagttcactttttacagtgctatttactgaagttatttattaaatatgcctaaaatacttaaatcggatgtcttgactctgatgtattttatcaggttgtgtgcatgaaatttttatagattaaagaagttgaggaaaagcattt

SEQ ID NO: 308 - DNA, 3859 bp, Homo sapiens
agccgccgccacccgccgcgcccgacacccgggaggccccgccagcccgcgggagaggcccagcgggagtcgcggaacagcaggcccgagcccaccgcgccgggccccggacgccgcgcggaaaagatgaatttacaaccaattttctggattggactgatcagttcagtttgctgtgtgtttgctcaaacagatgaaaatagatgtttaaaagcaaatgccaaatcatgtggagaatgtatacaagcagggccaaattgtgggtggtgcacaaattcaacatttttacaggaaggaatgcctacttctgcacgatgtgatgatttagaagccttaaaaaagaagggttgccctccagatgacatagaaaatcccagaggctccaaagatataaagaaaaataaaaatgtaaccaaccgtagcaaaggaacagcagagaagctcaagccagaggatattactcagatccaaccacagcagttggttttgcgattaagatcaggggagccacagacatttacattaaaattcaagagagctgaagactatcccattgacctctactaccttatggacctgtcttactcaatgaaagacgatttggagaatgtaaaaagtcttggaacagatctgatgaatgaaatgaggaggattacttcggacttcagaattggatttggctcatttgtggaaaagactgtgatgccttacattagcacaacaccagctaagctcaggaacccttgcacaagtgaacagaactgcaccagcccatttagctacaaaaatgtgctcagtcttactaataaaggagaagtatttaatgaacttgttggaaaacagcgcatatctggaaatttggattctccagaaggtggtttcgatgccatcatgcaagttgcagtttgtggatcactgattggctggaggaatgttacacggctgctggtgttttccacagatgccgggtttcactttgctggagatgggaaacttggtggcattgttttaccaaatgatggacaatgtcacctggaaaataatatgtacacaatgagccattattatgattatccttctattgctcaccttgtccagaaactgagtgaaaataatattcagacaatttttgcagttactgaagaatttcagcctgtttacaaggagctgaaaaacttgatccctaagtcagcagtaggaacattatctgcaaattctagcaatgtaattcagttgatcattgatgcatacaattccctttcctcagaagtcattttggaaaacggcaaattgtcagaaggagtaacaataagttacaaatcttactgcaagaacggggtgaatggaacaggggaaaatggaagaaaatgttccaatatttccattggagatgaggttcaatttgaaattagcataacttcaaataagtgtccaaaaaaggattctgacagctttaaaattaggcctctgggctttacggaggaagtagaggttattcttcagtacatctgtgaatgtgaatgccaaagcgaaggcatccctgaaagtcccaagtgtcatgaaggaaatgggacatttgagtgtggcgcgtgcaggtgcaatgaagggcgtgttggtagacattgtgaatgcagcacagatgaagttaacagtgaagacatggatgcttactgcaggaaagaaaacagttcagaaatctgcagtaacaatggagagtgcgtctgcggacagtgtgtttgtaggaagagggataatacaaatgaaatttattctggcaaattctgcgagtgtgataatttcaactgtgatagatccaatggcttaatttgtggaggaaatggtgtttgcaagtgtcgtgtgtgtgagtgcaaccccaactacactggcagtgcatgtgactgttctttggatactagtacttgtgaagccagcaacggacagatctgcaatggccggggcatctgcgagtgtggtgtctgtaagtgtacagatccgaagtttcaagggcaaacgtgtgagatgtgtcagacctgccttggtgtctgtgctgagcataaagaatgtgttcagtgcagagccttcaataaaggagaaaagaaagacacatgcacacaggaatgttcctattttaacattaccaaggtagaaagtcgggacaaattaccccagccggtccaacctgatcctgtgtcccattgtaaggagaaggatgttgacgactgttggttctattttacgtattcagtgaatgggaacaacgaggtcatggttcatgttgtggagaatccagagtgtcccactggtccagacatcattccaattgtagctggtgtggttgctggaattgttcttattggccttgcattactgctgatatggaagcttttaatgataattcatgacagaagggagtttgctaaatttgaaaaggagaaaatgaatgccaaatgggacacgcaagaaaatccgatttacaagagtcctattaataatttcaagaatccaaactacggacgtaaagctggtctctaaattgccggtgaaaatcctatttataagagtgccgtaacaactgtggtcaatccgaagtatgagggaaaatgagtactgcccgtgcaaatcccacaacactgaatgcaaagtagcaatttccatagtcacagttaggtagctttagggcaatattgccatggttttactcatgtgcaggttttgaaaatgtacaatatgtataatttttaaaatgttttattattttgaaaataatgttgtaattcatgccagggactgacaaaagacttgagacaggatggttattcttgtcagctaaggtcacattgtgcctttttgaccttttcttcctggactattgaaatcaagcttattggattaagtgatatttctatagcgattgaaagggcaatagttaaagtaatgagcatgatgagagtttctgttaatcatgtattaaaactgatttttagctttacaaatatgtcagtttgcagttatgcagaatccaaagtaaatgtcctgctagctagttaaggattgttttaaatctgttattttgctatttgcctgttagacatgactgatgacatatctgaaagacaagtatgttgagagttgctggtgtaaaatacgtttgaaatagttgatctacaaaggccatgggaaaaattcagagagttaggaaggaaaaaccaatagctttaaaacctgtgtgccattttaagagttacttaatgtttggtaacttttatgccttcactttacaaattcaagccttagataaaagaaccgagcaattttctgctaaaaagtccttgatttagcactatttacatacaggccatactttacaaagtatttgctgaatggggaccttttgagttgaatttattttattatttttattttgtttaatgtctggtgctttctatcacctcttctaatcttttaatgtatttgtttgcaattttggggtaagactttttttatgagtactttttctttgaagttttagcggtcaatttgcctttttaatgaacatgtgaagttatactgtggctatgcaacagctctcacctacgcgagtcttactttgagttagtgccataacagaccactgtatgtttacttctcaccatttgagttgcccatcttgtttcacactagtcacattcttgttttaagtgcctttagttttaacagttcactttttacagtgctatttactgaagttatttattaaatatgcctaaaatacttaaatcggatgtcttgactctgatgtattttatcaggttgtgtgcatgaaatttttatagattaaagaagttgaggaaaagcattt

SEQ ID NO: 309 - DNA, 3733 bp, Homo sapiens
atgaatttacaaccaattttctggattggactgatcagttcagtttgctgtgtgtttgctcaaacagatgaaaatagatgtttaaaagcaaatgccaaatcatgtggagaatgtatacaagcagggccaaattgtgggtggtgcacaaattcaacatttttacaggaaggaatgcctacttctgcacgatgtgatgatttagaagccttaaaaaagaagggttgccctccagatgacatagaaaatcccagaggctccaaagatataaagaaaaataaaaatgtaaccaaccgtagcaaaggaacagcagagaagctcaagccagaggatattactcagatccaaccacagcagttggttttgcgattaagatcaggggagccacagacatttacattaaaattcaagagagctgaagactatcccattgacctctactaccttatggacctgtcttactcaatgaaagacgatttggagaatgtaaaaagtcttggaacagatctgatgaatgaaatgaggaggattacttcggacttcagaattggatttggctcatttgtggaaaagactgtgatgccttacattagcacaacaccagctaagctcaggaacccttgcacaagtgaacagaactgcaccagcccatttagctacaaaaatgtgctcagtcttactaataaaggagaagtatttaatgaacttgttggaaaacagcgcatatctggaaatttggattctccagaaggtggtttcgatgccatcatgcaagttgcagtttgtggatcactgattggctggaggaatgttacacggctgctggtgttttccacagatgccgggtttcactttgctggagatgggaaacttggtggcattgttttaccaaatgatggacaatgtcacctggaaaataatatgtacacaatgagccattattatgattatccttctattgctcaccttgtccagaaactgagtgaaaataatattcagacaatttttgcagttactgaagaatttcagcctgtttacaaggagctgaaaaacttgatccctaagtcagcagtaggaacattatctgcaaattctagcaatgtaattcagttgatcattgatgcatacaattccctttcctcagaagtcattttggaaaacggcaaattgtcagaaggagtaacaataagttacaaatcttactgcaagaacggggtgaatggaacaggggaaaatggaagaaaatgttccaatatttccattggagatgaggttcaatttgaaattagcataacttcaaataagtgtccaaaaaaggattctgacagctttaaaattaggcctctgggctttacggaggaagtagaggttattcttcagtacatctgtgaatgtgaatgccaaagcgaaggcatccctgaaagtcccaagtgtcatgaaggaaatgggacatttgagtgtggcgcgtgcaggtgcaatgaagggcgtgttggtagacattgtgaatgcagcacagatgaagttaacagtgaagacatggatgcttactgcaggaaagaaaacagttcagaaatctgcagtaacaatggagagtgcgtctgcggacagtgtgtttgtaggaagagggataatacaaatgaaatttattctggcaaattctgcgagtgtgataatttcaactgtgatagatccaatggcttaatttgtggaggaaatggtgtttgcaagtgtcgtgtgtgtgagtgcaaccccaactacactggcagtgcatgtgactgttctttggatactagtacttgtgaagccagcaacggacagatctgcaatggccggggcatctgcgagtgtggtgtctgtaagtgtacagatccgaagtttcaagggcaaacgtgtgagatgtgtcagacctgccttggtgtctgtgctgagcataaagaatgtgttcagtgcagagccttcaataaaggagaaaagaaagacacatgcacacaggaatgttcctattttaacattaccaaggtagaaagtcgggacaaattaccccagccggtccaacctgatcctgtgtcccattgtaaggagaaggatgttgacgactgttggttctattttacgtattcagtgaatgggaacaacgaggtcatggttcatgttgtggagaatccagagtgtcccactggtccagacatcattccaattgtagctggtgtggttgctggaattgttcttattggccttgcattactgctgatatggaagcttttaatgataattcatgacagaagggagtttgctaaatttgaaaaggagaaaatgaatgccaaatgggacacgcaagaaaatccgatttacaagagtcctattaataatttcaagaatccaaactacggacgtaaagctggtctctaaattgccggtgaaaatcctatttataagagtgccgtaacaactgtggtcaatccgaagtatgagggaaaatgagtactgcccgtgcaaatcccacaacactgaatgcaaagtagcaatttccatagtcacagttaggtagctttagggcaatattgccatggttttactcatgtgcaggttttgaaaatgtacaatatgtataatttttaaaatgttttattattttgaaaataatgttgtaattcatgccagggactgacaaaagacttgagacaggatggttattcttgtcagctaaggtcacattgtgcctttttgaccttttcttcctggactattgaaatcaagcttattggattaagtgatatttctatagcgattgaaagggcaatagttaaagtaatgagcatgatgagagtttctgttaatcatgtattaaaactgatttttagctttacaaatatgtcagtttgcagttatgcagaatccaaagtaaatgtcctgctagctagttaaggattgttttaaatctgttattttgctatttgcctgttagacatgactgatgacatatctgaaagacaagtatgttgagagttgctggtgtaaaatacgtttgaaatagttgatctacaaaggccatgggaaaaattcagagagttaggaaggaaaaaccaatagctttaaaacctgtgtgccattttaagagttacttaatgtttggtaacttttatgccttcactttacaaattcaagccttagataaaagaaccgagcaattttctgctaaaaagtccttgatttagcactatttacatacaggccatactttacaaagtatttgctgaatggggaccttttgagttgaatttattttattatttttattttgtttaatgtctggtgctttctatcacctcttctaatcttttaatgtatttgtttgcaattttggggtaagactttttttatgagtactttttctttgaagttttagcggtcaatttgcctttttaatgaacatgtgaagttatactgtggctatgcaacagctctcacctacgcgagtcttactttgagttagtgccataacagaccactgtatgtttacttctcaccatttgagttgcccatcttgtttcacactagtcacattcttgttttaagtgcctttagttttaacagttcactttttacagtgctatttactgaagttatttattaaatatgcctaaaatacttaaatcggatgtcttgactctgatgtattttatcaggttgtgtgcatgaaatttttatagattaaagaagttgaggaaaagcattt

SEQ ID NO: 310 - DNA, 3804 bp, Homo sapiens
agccgccgccacccgccgcgcccgacacccgggaggccccgccagcccgcgggagaggcccagcgggagtcgcggaacagcaggcccgagcccaccgcgccgggccccggacgccgcgcggaaaagatgaatttacaaccaattttctggattggactgatcagttcagtttgctgtgtgtttgctcaaacagatgaaaatagatgtttaaaagcaaatgccaaatcatgtggagaatgtatacaagcagggccaaattgtgggtggtgcacaaattcaacatttttacaggaaggaatgcctacttctgcacgatgtgatgatttagaagccttaaaaaagaagggttgccctccagatgacatagaaaatcccagaggctccaaagatataaagaaaaataaaaatgtaaccaaccgtagcaaaggaacagcagagaagctcaagccagaggatattactcagatccaaccacagcagttggttttgcgattaagatcaggggagccacagacatttacattaaaattcaagagagctgaagactatcccattgacctctactaccttatggacctgtcttactcaatgaaagacgatttggagaatgtaaaaagtcttggaacagatctgatgaatgaaatgaggaggattacttcggacttcagaattggatttggctcatttgtggaaaagactgtgatgccttacattagcacaacaccagctaagctcaggaacccttgcacaagtgaacagaactgcaccagcccatttagctacaaaaatgtgctcagtcttactaataaaggagaagtatttaatgaacttgttggaaaacagcgcatatctggaaatttggattctccagaaggtggtttcgatgccatcatgcaagttgcagtttgtggatcactgattggctggaggaatgttacacggctgctggtgttttccacagatgccgggtttcactttgctggagatgggaaacttggtggcattgttttaccaaatgatggacaatgtcacctggaaaataatatgtacacaatgagccattattatgattatccttctattgctcaccttgtccagaaactgagtgaaaataatattcagacaatttttgcagttactgaagaatttcagcctgtttacaaggagctgaaaaacttgatccctaagtcagcagtaggaacattatctgcaaattctagcaatgtaattcagttgatcattgatgcatacaattccctttcctcagaagtcattttggaaaacggcaaattgtcagaaggagtaacaataagttacaaatcttactgcaagaacggggtgaatggaacaggggaaaatggaagaaaatgttccaatatttccattggagatgaggttcaatttgaaattagcataacttcaaataagtgtccaaaaaaggattctgacagctttaaaattaggcctctgggctttacggaggaagtagaggttattcttcagtacatctgtgaatgtgaatgccaaagcgaaggcatccctgaaagtcccaagtgtcatgaaggaaatgggacatttgagtgtggcgcgtgcaggtgcaatgaagggcgtgttggtagacattgtgaatgcagcacagatgaagttaacagtgaagacatggatgcttactgcaggaaagaaaacagttcagaaatctgcagtaacaatggagagtgcgtctgcggacagtgtgtttgtaggaagagggataatacaaatgaaatttattctggcaaattctgcgagtgtgataatttcaactgtgatagatccaatggcttaatttgtggaggaaatggtgtttgcaagtgtcgtgtgtgtgagtgcaaccccaactacactggcagtgcatgtgactgttctttggatactagtacttgtgaagccagcaacggacagatctgcaatggccggggcatctgcgagtgtggtgtctgtaagtgtacagatccgaagtttcaagggcaaacgtgtgagatgtgtcagacctgccttggtgtctgtgctgagcataaagaatgtgttcagtgcagagccttcaataaaggagaaaagaaagacacatgcacacaggaatgttcctattttaacattaccaaggtagaaagtcgggacaaattaccccagccggtccaacctgatcctgtgtcccattgtaaggagaaggatgttgacgactgttggttctattttacgtattcagtgaatgggaacaacgaggtcatggttcatgttgtggagaatccagagtgtcccactggtccagacatcattccaattgtagctggtgtggttgctggaattgttcttattggccttgcattactgctgatatggaagcttttaatgataattcatgacagaagggagtttgctaaatttgaaaaggagaaaatgaatgccaaatgggacacgcaagaaaatccgatttacaagagtcctattaataatttcaagaatccaaactacggacgtaaagctggtctctaaattgccggtgaaaatcctatttataagagtgccgtaacaactgtggtcaatccgaagtatgagggaaaatgagtactgcccgtgcaaatcccacaacactgaatgcaaagtagcaatttccatagtcacagttaggtagctttagggcaatattgccatggttttactcatgtgcaggttttgaaaatgtacaatatgtataatttttaaaatgttttattattttgaaaataatgttgtaattcatgccagggactgacaaaagacttgagacaggatggttattcttgtcagctaaggtcacattgtgcctttttgaccttttcttcctggactattgaaatcaagcttattggattaagtgatatttctatagcgattgaaagggcaatagttaaagtaatgagcatgatgagagtttctgttaatcatgtattaaaactgatttttagctttacaaatatgtcagtttgcagttatgcagaatccaaagtaaatgtcctgctagctagttaaggattgttttaaatctgttattttgctatttgcctgttagacatgactgatgacatatctgaaagacaagtatgttgagagttgctggtgtaaaatacgtttgaaatagttgatctacaaaggccatgggaaaaattcagagagttaggaaggaaaaaccaatagctttaaaacctgtgtgccattttaagagttacttaatgtttggtaacttttatgccttcactttacaaattcaagccttagataaaagaaccgagcaattttctgttgctgaatggggaccttttgagttgaatttattttattatttttattttgtttaatgtctggtgctttctatcacctcttctaatcttttaatgtatttgtttgcaattttggggtaagactttttttatgagtactttttctttgaagttttagcggtcaatttgcctttttaatgaacatgtgaagttatactgtggctatgcaacagctctcacctacgcgagtcttactttgagttagtgccataacagaccactgtatgtttacttctcaccatttgagttgcccatcttgtttcacactagtcacattcttgttttaagtgcctttagttttaacagttcactttttacagtgctatttactgaagttatttattaaatatgcctaaaatacttaaatcggatgtcttgactctgatgtattttatcaggttgtgtgcatgaaatttttatagattaaagaagttgaggaaaagcattt

SEQ ID NO: 311 - DNA, 3762 bp, Homo sapiens
atgaatttacaaccaattttctggattggactgatcagttcagtttgctgtgtgtttgctcaaacagatgaaaatagatgtttaaaagcaaatgccaaatcatgtggagaatgtatacaagcagggccaaattgtgggtggtgcacaaattcaacatttttacaggaaggaatgcctacttctgcacgatgtgatgatttagaagccttaaaaaagaagggttgccctccagatgacatagaaaatcccagaggctccaaagatataaagaaaaataaaaatgtaaccaaccgtagcaaaggaacagcagagaagctcaagccagaggatattactcagatccaaccacagcagttggttttgcgattaagatcaggggagccacagacatttacattaaaattcaagagagctgaagactatcccattgacctctactaccttatggacctgtcttactcaatgaaagacgatttggagaatgtaaaaagtcttggaacagatctgatgaatgaaatgaggaggattacttcggacttcagaattggatttggctcatttgtggaaaagactgtgatgccttacattagcacaacaccagctaagctcaggaacccttgcacaagtgaacagaactgcaccagcccatttagctacaaaaatgtgctcagtcttactaataaaggagaagtatttaatgaacttgttggaaaacagcgcatatctggaaatttggattctccagaaggtggtttcgatgccatcatgcaagttgcagtttgtggatcactgattggctggaggaatgttacacggctgctggtgttttccacagatgccgggtttcactttgctggagatgggaaacttggtggcattgttttaccaaatgatggacaatgtcacctggaaaataatatgtacacaatgagccattattatgattatccttctattgctcaccttgtccagaaactgagtgaaaataatattcagacaatttttgcagttactgaagaatttcagcctgtttacaaggagctgaaaaacttgatccctaagtcagcagtaggaacattatctgcaaattctagcaatgtaattcagttgatcattgatgcatacaattccctttcctcagaagtcattttggaaaacggcaaattgtcagaaggagtaacaataagttacaaatcttactgcaagaacggggtgaatggaacaggggaaaatggaagaaaatgttccaatatttccattggagatgaggttcaatttgaaattagcataacttcaaataagtgtccaaaaaaggattctgacagctttaaaattaggcctctgggctttacggaggaagtagaggttattcttcagtacatctgtgaatgtgaatgccaaagcgaaggcatccctgaaagtcccaagtgtcatgaaggaaatgggacatttgagtgtggcgcgtgcaggtgcaatgaagggcgtgttggtagacattgtgaatgcagcacagatgaagttaacagtgaagacatggatgcttactgcaggaaagaaaacagttcagaaatctgcagtaacaatggagagtgcgtctgcggacagtgtgtttgtaggaagagggataatacaaatgaaatttattctggcaaattctgcgagtgtgataatttcaactgtgatagatccaatggcttaatttgtggaggaaatggtgtttgcaagtgtcgtgtgtgtgagtgcaaccccaactacactggcagtgcatgtgactgttctttggatactagtacttgtgaagccagcaacggacagatctgcaatggccggggcatctgcgagtgtggtgtctgtaagtgtacagatccgaagtttcaagggcaaacgtgtgagatgtgtcagacctgccttggtgtctgtgctgagcataaagaatgtgttcagtgcagagccttcaataaaggagaaaagaaagacacatgcacacaggaatgttcctattttaacattaccaaggtagaaagtcgggacaaattaccccagccggtccaacctgatcctgtgtcccattgtaaggagaaggatgttgacgactgttggttctattttacgtattcagtgaatgggaacaacgaggtcatggttcatgttgtggagaatccagagtgtcccactggtccagacatcattccaattgtagctggtgtggttgctggaattgttcttattggccttgcattactgctgatatggaagcttttaatgataattcatgacagaagggagtttgctaaatttgaaaaggagaaaatgaatgccaaatgggacacggtaagttacaaaacatccaaaaagcaaagtggcttataaagtaaatgtaatactcctaagacttatgtattagctgtcaggctgattattaaagtcctttctaagtattttattcccccaaaagtttcttactcaaggaatttgcatttagtgaaaaacagaaagcatcctaaatatatcccattgaaacaaaacattgattataagcatgtatattctggttactgtggccagtatttttatttctttaatagttttgatcctaaatctgccttttcatctaatgtgaagtagaatcctaaataatgttatctgtgtagcaagctattcaatggaaagctgcttctttctttaaaacaaacaaacaaaaaaaaccttcagtgaaagccagattcaaaaggttatataccaagcttgtccaactcgcagctcgtcggccaggacatgcagcccagaatagctttgaatgtggccccaacacaaatttgtaaactttcttagaaattgtaattattattattatttttttttggtaacttttttttaaagctcatcagctatcgttagtgtattttatgtgtggcccaagacaattcttcttcttccagtgtggcccagggaagccaaaagattggacacccctgctatatactatatgattccatttagaggacattctggaaaagcaaaactgtaggggcaaaaatcagtggttgctaggggctggaatgggggaaagtgttgaccacagaggggcgtaagggatcttccttgggatgatcttgattgtgggtggatttatgtatttgaaaactcacagaactatgtactttaaaaagatgtatgttcctctatgaaaattatatctcagtaaactttggcttataaaaatcttaaaagccctaagtgaccgaaaggttatgttagcattgagtgctttgaaatatggagtcagagggtggggtaaccaaatgttggcctttgtgtattcatcttttgatacaagaaagcaatgccaatcttcagtatttttaaattgtaaatgaattttgtagttagttgcactttactacaatttgcttgggtttttaaaaattatcaattttttaaattacaaatttcagaagggtagaaataaaaaaaaagacatttatagtgttcaaacactataaagggattttttttttctgatgaaatcattagaaactatttcttttactttagcaagaaaatccgatttacaagagtcctattaataatttcaagaatccaaactacggacgtaaagctggtctctaaattgccgttcgtattttgtttcactttctgcctttgcatgtgaacttctatcttttttactgcactgtgtgtcctttatcactattgctgttctttttttaagtctggctttaaatatcgctattgtggctt

SEQ ID NO: 312 - DNA, 3888 bp, Homo sapiens
agccgccgccacccgccgcgcccgacacccgggaggccccgccagcccgcgggagaggcccagcgggagtcgcggaacagcaggcccgagcccaccgcgccgggccccggacgccgcgcggaaaagatgaatttacaaccaattttctggattggactgatcagttcagtttgctgtgtgtttgctcaaacagatgaaaatagatgtttaaaagcaaatgccaaatcatgtggagaatgtatacaagcagggccaaattgtgggtggtgcacaaattcaacatttttacaggaaggaatgcctacttctgcacgatgtgatgatttagaagccttaaaaaagaagggttgccctccagatgacatagaaaatcccagaggctccaaagatataaagaaaaataaaaatgtaaccaaccgtagcaaaggaacagcagagaagctcaagccagaggatattactcagatccaaccacagcagttggttttgcgattaagatcaggggagccacagacatttacattaaaattcaagagagctgaagactatcccattgacctctactaccttatggacctgtcttactcaatgaaagacgatttggagaatgtaaaaagtcttggaacagatctgatgaatgaaatgaggaggattacttcggacttcagaattggatttggctcatttgtggaaaagactgtgatgccttacattagcacaacaccagctaagctcaggaacccttgcacaagtgaacagaactgcaccagcccatttagctacaaaaatgtgctcagtcttactaataaaggagaagtatttaatgaacttgttggaaaacagcgcatatctggaaatttggattctccagaaggtggtttcgatgccatcatgcaagttgcagtttgtggatcactgattggctggaggaatgttacacggctgctggtgttttccacagatgccgggtttcactttgctggagatgggaaacttggtggcattgttttaccaaatgatggacaatgtcacctggaaaataatatgtacacaatgagccattattatgattatccttctattgctcaccttgtccagaaactgagtgaaaataatattcagacaatttttgcagttactgaagaatttcagcctgtttacaaggagctgaaaaacttgatccctaagtcagcagtaggaacattatctgcaaattctagcaatgtaattcagttgatcattgatgcatacaattccctttcctcagaagtcattttggaaaacggcaaattgtcagaaggagtaacaataagttacaaatcttactgcaagaacggggtgaatggaacaggggaaaatggaagaaaatgttccaatatttccattggagatgaggttcaatttgaaattagcataacttcaaataagtgtccaaaaaaggattctgacagctttaaaattaggcctctgggctttacggaggaagtagaggttattcttcagtacatctgtgaatgtgaatgccaaagcgaaggcatccctgaaagtcccaagtgtcatgaaggaaatgggacatttgagtgtggcgcgtgcaggtgcaatgaagggcgtgttggtagacattgtgaatgcagcacagatgaagttaacagtgaagacatggatgcttactgcaggaaagaaaacagttcagaaatctgcagtaacaatggagagtgcgtctgcggacagtgtgtttgtaggaagagggataatacaaatgaaatttattctggcaaattctgcgagtgtgataatttcaactgtgatagatccaatggcttaatttgtggaggaaatggtgtttgcaagtgtcgtgtgtgtgagtgcaaccccaactacactggcagtgcatgtgactgttctttggatactagtacttgtgaagccagcaacggacagatctgcaatggccggggcatctgcgagtgtggtgtctgtaagtgtacagatccgaagtttcaagggcaaacgtgtgagatgtgtcagacctgccttggtgtctgtgctgagcataaagaatgtgttcagtgcagagccttcaataaaggagaaaagaaagacacatgcacacaggaatgttcctattttaacattaccaaggtagaaagtcgggacaaattaccccagccggtccaacctgatcctgtgtcccattgtaaggagaaggatgttgacgactgttggttctattttacgtattcagtgaatgggaacaacgaggtcatggttcatgttgtggagaatccagagtgtcccactggtccagacatcattccaattgtagctggtgtggttgctggaattgttcttattggccttgcattactgctgatatggaagcttttaatgataattcatgacagaagggagtttgctaaatttgaaaaggagaaaatgaatgccaaatgggacacggtaagttacaaaacatccaaaaagcaaagtggcttataaagtaaatgtaatactcctaagacttatgtattagctgtcaggctgattattaaagtcctttctaagtattttattcccccaaaagtttcttactcaaggaatttgcatttagtgaaaaacagaaagcatcctaaatatatcccattgaaacaaaacattgattataagcatgtatattctggttactgtggccagtatttttatttctttaatagttttgatcctaaatctgccttttcatctaatgtgaagtagaatcctaaataatgttatctgtgtagcaagctattcaatggaaagctgcttctttctttaaaacaaacaaacaaaaaaaaccttcagtgaaagccagattcaaaaggttatataccaagcttgtccaactcgcagctcgtcggccaggacatgcagcccagaatagctttgaatgtggccccaacacaaatttgtaaactttcttagaaattgtaattattattattatttttttttggtaacttttttttaaagctcatcagctatcgttagtgtattttatgtgtggcccaagacaattcttcttcttccagtgtggcccagggaagccaaaagattggacacccctgctatatactatatgattccatttagaggacattctggaaaagcaaaactgtaggggcaaaaatcagtggttgctaggggctggaatgggggaaagtgttgaccacagaggggcgtaagggatcttccttgggatgatcttgattgtgggtggatttatgtatttgaaaactcacagaactatgtactttaaaaagatgtatgttcctctatgaaaattatatctcagtaaactttggcttataaaaatcttaaaagccctaagtgaccgaaaggttatgttagcattgagtgctttgaaatatggagtcagagggtggggtaaccaaatgttggcctttgtgtattcatcttttgatacaagaaagcaatgccaatcttcagtatttttaaattgtaaatgaattttgtagttagttgcactttactacaatttgcttgggtttttaaaaattatcaattttttaaattacaaatttcagaagggtagaaataaaaaaaaagacatttatagtgttcaaacactataaagggattttttttttctgatgaaatcattagaaactatttcttttactttagcaagaaaatccgatttacaagagtcctattaataatttcaagaatccaaactacggacgtaaagctggtctctaaattgccgttcgtattttgtttcactttctgcctttgcatgtgaacttctatcttttttactgcactgtgtgtcctttatcactattgctgttctttttttaagtctggctttaaatatcgctattgtggctt

SEQ ID NO: 313 - DNA, 3850 bp, Homo sapiens
agccgccgccacccgccgcgcccgacacccgggaggccccgccagcccgcgggagaggcccagcgggagtcgcggaacagcaggcccgagcccaccgcgccgggccccggacgccgcgcggaaaagatgaatttacaaccaattttctggattggactgatcagttcagtttgctgtgtgtttgctcaaacagattttctataagaagcatatgctggttttataatctcagaaaagatacgttggagacagtctgtattagcgcttaccatgtagaaggcatactcttccttagatgaaaatagatgtttaaaagcaaatgccaaatcatgtggagaatgtatacaagcagggccaaattgtgggtggtgcacaaattcaacatttttacaggaaggaatgcctacttctgcacgatgtgatgatttagaagccttaaaaaagaagggttgccctccagatgacatagaaaatcccagaggctccaaagatataaagaaaaataaaaatgtaaccaaccgtagcaaaggaacagcagagaagctcaagccagaggatattactcagatccaaccacagcagttggttttgcgattaagatcaggggagccacagacatttacattaaaattcaagagagctgaagactatcccattgacctctactaccttatggacctgtcttactcaatgaaagacgatttggagaatgtaaaaagtcttggaacagatctgatgaatgaaatgaggaggattacttcggacttcagaattggatttggctcatttgtggaaaagactgtgatgccttacattagcacaacaccagctaagctcaggaacccttgcacaagtgaacagaactgcaccagcccatttagctacaaaaatgtgctcagtcttactaataaaggagaagtatttaatgaacttgttggaaaacagcgcatatctggaaatttggattctccagaaggtggtttcgatgccatcatgcaagttgcagtttgtggatcactgattggctggaggaatgttacacggctgctggtgttttccacagatgccgggtttcactttgctggagatgggaaacttggtggcattgttttaccaaatgatggacaatgtcacctggaaaataatatgtacacaatgagccattattatgattatccttctattgctcaccttgtccagaaactgagtgaaaataatattcagacaatttttgcagttactgaagaatttcagcctgtttacaaggagctgaaaaacttgatccctaagtcagcagtaggaacattatctgcaaattctagcaatgtaattcagttgatcattgatgcatacaattccctttcctcagaagtcattttggaaaacggcaaattgtcagaaggagtaacaataagttacaaatcttactgcaagaacggggtgaatggaacaggggaaaatggaagaaaatgttccaatatttccattggagatgaggttcaatttgaaattagcataacttcaaataagtgtccaaaaaaggattctgacagctttaaaattaggcctctgggctttacggaggaagtagaggttattcttcagtacatctgtgaatgtgaatgccaaagcgaaggcatccctgaaagtcccaagtgtcatgaaggaaatgggacatttgagtgtggcgcgtgcaggtgcaatgaagggcgtgttggtagacattgtgaatgcagcacagatgaagttaacagtgaagacatggatgcttactgcaggaaagaaaacagttcagaaatctgcagtaacaatggagagtgcgtctgcggacagtgtgtttgtaggaagagggataatacaaatgaaatttattctggcaaattctgcgagtgtgataatttcaactgtgatagatccaatggcttaatttgtggaggaaatggtgtttgcaagtgtcgtgtgtgtgagtgcaaccccaactacactggcagtgcatgtgactgttctttggatactagtacttgtgaagccagcaacggacagatctgcaatggccggggcatctgcgagtgtggtgtctgtaagtgtacagatccgaagtttcaagggcaaacgtgtgagatgtgtcagacctgccttggtgtctgtgctgagcataaagaatgtgttcagtgcagagccttcaataaagtagaaagtcgggacaaattaccccagccggtccaacctgatcctgtgtcccattgtaaggagaaggatgttgacgactgttggttctattttacgtattcagtgaatgggaacaacgaggtcatggttcatgttgtggagaatccagtgtcccactggtccagacatcattccaattgtagctggtgtggttgctggaattgttcttattggccttgcattactgctgatatggaagcttttaatgataattcatgacagaagggagtttgctaaatttgaaaaggagaaaatgaatgccaaatgggacacgcaagaaaatccgatttacaagagtcctattaataatttcaagaatccaaactacggacgtaaagctggtctctaaattgccggtgaaaatcctatttataagagtgccgtaacaactgtggtcaatccgaagtatgagggaaaatgagtactgcccgtgcaaatcccacaacactgaatgcaaagtagcaatttccatagtcacagttaggtagctttagggcaatattgccatggttttactcatgtgcaggttttgaaaatgtacaatatgtataatttttaaaatgttttattattttgaaaataatgttgtaattcatgccagggactgacaaaagacttgagacaggatggttattcttgtcagctaaggtcacattgtgcctttttgaccttttcttcctggactattgaaatcaagcttattggattaagtgatatttctatagcgattgaaagggcaatagttaaagtaatgagcatgatgagagtttctgttaatcatgtattaaaactgatttttagctttacaaatatgtcagtttgcagttatgcagaatccaaagtaaatgtcctgctagctagttaaggattgttttaaatctgttattttgctatttgcctgttagacatgactgatgacatatctgaaagacaagtatgttgagagttgctggtgtaaaatacgtttgaaatagttgatctacaaaggccatgggaaaaattcagagagttaggaaggaaaaaccaatagctttaaaacctgtgtgccattttaagagttacttaatgtttggtaacttttatgccttcactttacaaattcaagccttagataaaagaaccgagcaattttctgttgctgaatggggaccttttgagttgaatttattttattatttttattttgtttaatgtctggtgctttctatcacctcttctaatcttttaatgtatttgtttgcaattttggggtaagactttttttatgagtactttttctttgaagttttagcggtcaatttgcctttttaatgaacatgtgaagttatactgtggctatgcaacagctctcacctacgcgagtcttactttgagttagtgccataacagaccactgtatgtttacttctcaccatttgagttgcccatcttgtttcacactagtcacattcttgttttaagtgcctttagttttaacagttcactttttacagtgctatttactgaagttatttattaaatatgcctaaaatacttaaatcggatgtcttgactctgatgtattttatcaggttgtgtgcatgaaatttttatagattaaagaagttgaggaaaagcattt

SEQ ID NO: 314 - DNA, 3614 bp, Homo sapiens
gtccgccaaaacctgcgcggatagggaagaacagcaccccggcgccgattgccgtaccaaacaagcctaacgtccgctgggccccggacgccgcgcggaaaagatgaatttacaaccaattttctggattggactgatcagttcagtttgctgtgtgtttgctcaaacagatgaaaatagatgtttaaaagcaaatgccaaatcatgtggagaatgtatacaagcagggccaaattgtgggtggtgcacaaattcaacatttttacaggaaggaatgcctacttctgcacgatgtgatgatttagaagccttaaaaaagaagggttgccctccagatgacatagaaaatcccagaggctccaaagatataaagaaaaataaaaatgtaaccaaccgtagcaaaggaacagcagagaagctcaagccagaggatattcatcagatccaaccacagcagttggttttgcgattaagatcaggggagccacagacatttacattaaaattcaagagagctgaagactatcccattgacctctactaccttatggacctgtcttattcaatgaaagacgatttggagaatgtaaaaagtcttggaacagatctgatgaatgaaatgaggaggattacttcggacttcagaattggatttggctcatttgtggaaaagactgtgatgccttacattagcacaacaccagctaagctcaggaacccttgcacaagtgaacagaactgcaccaccccatttagctacaaaaatgtgctcagtcttactaataaaggagaagtatttaatgaacttgttggaaaacagcgcatatctggaaatttggattctccagaaggtggtttcgatgccatcatgcaagttgcagtttgtggatcactgattggctggaggaatgttacacggctgctggtgttttccacagatgccgggtttcactttgctggagatgggaaacttggtggcattgttttaccaaatgatggacaatgtcacctggaaaataatatgtacacaatgagccattattatgattatccttctattgctcaccttgtccagaaactgagtgaaaataatattcagacaatttttgcagttactgaagaatttcagcctgtttacaaggagctgaaaaacttgatccctaagtcagcagtaggaacattatctgcaaattctagcaatgtaattcagttgatcattgatgcatacaattccctttcctcagaagtcattttggaaaacggcaaattgtcagaaggagtaacaataagttacaaatcttactgcaagaacggggtgaatggaacaggggaaaatggaagaaaatgttccaatatttccattggagatgaggttcaatttgaaattagcataacttcaaataagtgtccaaaaaaggattctgacagctttaaaattaggcctctgggctttacggaggaagtagaggttattcttcagtacatctgtgaatgtgaatgccaaagcgaaggcatccctgaaagtcccaagtgtcatgaaggaaatgggacatttgagtgtggcgcgtgcaggtgcaatgaagggcgtgttggtagacattgtgaatgcagcacagatgaagttaacagtgaagacatggatgcttactgcaggaaagaaaacagttcagaaatctgcagtaacaatggagagtgcgtctgcggacagtgtgtttgtaggaagagggataatacaaatgaaatttattctggcaaattctgcgagtgtgataatttcaactgtgatagatccaatggcttaatttgtggaggaaatggtgtttgcaagtgtcgtgtgtgtgagtgcaaccccaactacactggcagtgcatgtgactgttctttggatactagtacttgtgaagccagcaacggacagatctgcaatggccggggcatctgcgagtgtggtgtctgtaagtgtacagatccgaagtttcaagggcaaacgtgtgagatgtgtcagacctgccttggtgtctgtgctgagcataaagaatgtgttcagtgcagagccttcaataaaggagaaaagaaagacacatgcacacaggaatgttcctattttaacattaccaaggtagaaagtcgggacaaattaccccagccggtccaacctgatcctgtgtcccattgtaaggagaaggatgttgacgactgttggttctattttacgtattcagtgaatgggaacaacgaggtcatggttcatgttgtggagaatccagagtgtcccactggtccagacatcattccaattgtagctggtgtggttgctggaattgttcttattggccttgcattactgctgatatggaagcttttaatgataattcatgacagaagggagtttgctaaatttgaaaaggagaaaatgaatgccaaatgggacacgggtgaaaatcctatttataagagtgccgtaacaactgtggtcaatccgaagtatgagggaaaatgagtactgcccgtgcaaatcccacaacactgaatgcaaagtagcaatttccatagtcacagttaggtagctttagggcaatattgccatggttttactcatgtgcaggttttgaaaatgtacaatatgtataatttttaaaatgttttattattttgaaaataatgttgtaattcatgccagggactgacaaaagacttgagacaggatggttattcttgtcagctaaggtcacattgtgcctttttgaccttttcttcctggactattgaaatcaagcttattggattaagtgatatttctatagcgattgaaagggcaatagttaaagtaatgagcatgatgagagtttctgttaatcatgtattaaaactgatttttagctttacatatgtcagtttgcagttatgcagaatccaaagtaaatgtcctgctagctagttaaggattgttttaaatctgttattttgctatttgcctgttagacatgactgatgacatatctgaaagacaagtatgttgagagttgctggtgtaaaatacgtttgaaatagttgatctacaaaggccatgggaaaaattcagagagttaggaaggaaaaaccaatagctttaaaacctgtgtgccattttaagagttacttaatgtttggtaacttttatgccttcactttacaaattcaagccttagataaaagaaccgagcaattttctgctaaaaagtccttgatttagcactatttacatacaggccatactttacaaagtatttgctgaatggggaccttttgagttgaatttattttattatttttattttgtttaatgtctggtgctttctatcacctcttctaatcttttaatgtatttgtttgcaattttggggtaagacttttttatgagtactttttctttgaagttttagcggtcaatttgcctttttaatgaacatgtgaagttatactgtggctatgcaacagctctcacctacgcgagtcttactttgagttagtgccataacagaccactgtatgtttacttctcaccatttgagttgcccatcttgtttcacactagtcacattcttgttttaagtgcctttagttttaacagttca

SEQ ID NO: 315 - DNA, 1409 bp, Homo sapiens
gaatttctgggggcgcaccgccaagagctggggactcatggtttttccaaaaccagtgaccgcattggaatatacattcagtaggtctgatccaacttcgtatgcagggtacattgaagaccttaagaagtttctaaaaccatatactttagaagaacagaagaacctcacagtctgtcctgatggagcactttttgaacagaagggtccagtttatgttgcatgtcagtttcctatttcattacttcaagcatgcagtggtatgaatgatcctgattttggctattctcaaggaaacccttgtattcttgtgaaaatgaacagaataattggattaaagcctgaaggagtgccaaggatagattgtgtttcaaagaatgaagatataccaaatgtagcagtttatcctcataatggaatgatagacttaaaatatttcccatattatgggaaaaaactgcatgttgggtatctacagccattggttgctgttcaggtcagctttgctcctaacaacactgggaaagaagtaacagttgagtgcaagattgatggatcagccaacctaaaaagtcaggatgatcgtgacaagtttttgggacgagttatgttcaaaatcacagcacgtgcatagtatgagtaggatatctccacagattttagggataaaatggtacccggccaacatcaagtgactttatagctgcaagaaatgtggtatgtggagaagttctgtatgtgaggaaggaaaaaaagaaaataaaagtgtgtttgaaaaatattatcttgggttctttgtaaaatttattttttacatgctgaattagcctcgatctttttgattaagagcacaaacttttttttgtaaaacatgtaaaaaaaaaactgggattaatttttagtgttggaactgcctcttattttaggctgtagataaaatagcatttttaggttagccagtgtgactatgcacctaattttttatgagattaaattcataagacttaatttgtacaatagtttgtgaaatatcttgttactgcttttatttagcagactgtggactgtaataaagtatataaattgtgaaatataaaaacttggaacttattcaaagcttcaaagcaaacaacagttttgtgtaagcattctttcccctccagtattaggtgtattcttggtaggattatttgtgataatttgggctacttggctgagaaagttgtgcttcccatatgatctgtgttgcttcttgttttttcttaaggctattgtttattgttacttttctcctttttaaaaaaaaaaaaaggcagccgggcgcagtggctcacgcctgtagtcccagcactttgggaggccgaggcgggcggatcacaaggtcaagagatcgagaccatcctggccaa

SEQ ID NO: 316 - DNA, 1982 bp, Homo sapiens
gaatttctgggggcgcaccgccaagagctggggatcgcagtatgtggtagggaagtgatgctgtctgaaggtgacatcctgttctcctctcttctgtcctctccatccttattttggccacctggtttgatcttgctcttctacctagttttttatgggttcctggctgcactcttctcattcacgatgtgggttatgcttcagactctcaacgatgaggttccaaaataccgtgaccagattcctagcccaggactcatggtttttccaaaaccagtgaccgcattggaatatacattcagtaggtctgatccaacttcgtatgcagggtacattgaagaccttaagaagtttctaaaaccatatactttagaagaacagaagaacctcacagtctgtcctgatggagcactttttgaacagaagggtccagtttatgttgcatgtcagtttcctatttcattacttcaagcatgcagtggtatgaatgatcctgattttggctattctcaaggaaacccttgtattcttgtgaaaatgaacagaataattggattaaagcctgaaggagtgccaaggatagattgtgtttcaaagaatgaagatataccaaatgtagcagtttatcctcataatggaatgatagacttaaaatatttcccatattatgggaaaaaactgcatgttgggtatctacagccattggttgctgttcaggtcagctttgctcctaacaacactgggaaagaagtaacagttgagtgcaagattgatggatcagccaacctaaaaagtcaggatgatcgtgacaagtttttgggacgagttatgttcaaaatcacagcacgtgcatagtatgagtaggatatctccacagagtaaatgttgtgttgtctgtcttcattttgtaacagctggaccttccattctagaattatgagaccaccttggagaaaggtgtgtggtacatgacattgggttacatcataacgtgcttccagatcatagtgttcagtgtcctctgaagtaactgcctgttgcctctgctgccctttgaaccagtgtacagtcgccagatagggaccggtgaacacctgattccaaacatgtaggatgggggtcttgtcctctttttatgtggtttaattgccaagtgtctaaagcttaatatgccgtgctatgtaaatattttatggatataacaactgtcatattttgatgtcaacagagttttagggataaaatggtacccggccaacatcaagtgactttatagctgcaagaaatgtggtatgtggagaagttctgtatgtgaggaaggaaaaaaagaaaataaaagtgtgtttgaaaaatattatcttgggttctttgtaaaatttattttttacatgctgaattagcctcgatctttttgattaagagcacaaacttttttttgtaaaacatgtaaaaaaaaaactgggattaatttttagtgttggaactgcctcttattttaggctgtagataaaatagcatttttaggttagccagtgtgactatgcacctaattttttatgagattaaattcataagacttaatttgtacaatagtttgtgaaatatcttgttactgcttttatttagcagactgtggactgtaataaagtatataaattgtgaaatataaaaacttggaacttattcaaagcttcaaagcaaacaacagttttgtgtaagcattctttcccctccagtattaggtgtattcttggtaggattatttgtgataatttgggctacttggctgagaaagttgtgcttcccatatgatctgtgttgcttcttgttttttcttaaggctattgtttattgttacttttctcctttttaaaaaaaaaaaaaggcagccgggcgcagtggctcacgcctgtagtcccagcactttgggaggccgaggcgggcggatcacaaggtcaagagatcgagaccatcctggccaa

SEQ ID NO: 317 - DNA, 2143 bp, Homo sapiens
ggggaggggacgattaagttccctcagagaggaagccgcgggccgactggagtcgttttcgtgctctccgcacccgcccgccgcgggtagcatcttctcagcgccccggcgcccaggaacgcccaggaaacccagtcctcctcctaagcaacctgcggcgcggggacgcccgccttttgctattattataaacgatcgcagtatgtggtagggaagtgatgctgtctgaaggtgacatcctgttctcctctcttctgtcctctccatccttattttggccacctggtttgatcttgctcttctacctagttttttatgggttcctggctgcactcttctcattcacgatgtgggttatgcttcagactctcaacgatgaggttccaaaataccgtgaccagattcctagcccaggactcatggtttttccaaaaccagtgaccgcattggaatatacattcagtaggtctgatccaacttcgtatgcagggtacattgaagaccttaagaagtttctaaaaccatatactttagaagaacagaagaacctcacagtctgtcctgatggagcactttttgaacagaagggtccagtttatgttgcatgtcagtttcctatttcattacttcaagcatgcagtggtatgaatgatcctgattttggctattctcaaggaaacccttgtattcttgtgaaaatgaacagaataattggattaaagcctgaaggagtgccaaggatagattgtgtttcaaagaatgaagatataccaaatgtagcagtttatcctcataatggaatgatagacttaaaatatttcccatattatgggaaaaaactgcatgttgggtatctacagccattggttgctgttcaggtcagctttgctcctaacaacactgggaaagaagtaacagttgagtgcaagattgatggatcagccaacctaaaaagtcaggatgatcgtgacaagtttttgggacgagttatgttcaaaatcacagcacgtgcatagtatgagtaggatatctccacagagtaaatgttgtgttgtctgtcttcattttgtaacagctggaccttccattctagaattatgagaccaccttggagaaaggtgtgtggtacatgacattgggttacatcataacgtgcttccagatcatagtgttcagtgtcctctgaagtaactgcctgttgcctctgctgccctttgaaccagtgtacagtcgccagatagggaccggtgaacacctgattccaaacatgtaggatgggggtcttgtcctctttttatgtggtttaattgccaagtgtctaaagcttaatatgccgtgctatgtaaatattttatggatataacaactgtcatattttgatgtcaacagagttttagggataaaatggtacccggccaacatcaagtgactttatagctgcaagaaatgtggtatgtggagaagttctgtatgtgaggaaggaaaaaaagaaaataaaagtgtgtttgaaaaatattatcttgggttctttgtaaaatttattttttacatgctgaattagcctcgatctttttgattaagagcacaaacttttttttgtaaaacatgtaaaaaaaaaactgggattaatttttagtgttggaactgcctcttattttaggctgtagataaaatagcatttttaggttagccagtgtgactatgcacctaattttttatgagattaaattcataagacttaatttgtacaatagtttgtgaaatatcttgttactgcttttatttagcagactgtggactgtaataaagtatataaattgtgaaatataaaaacttggaacttattcaaagcttcaaagcaaacaacagttttgtgtaagcattctttcccctccagtattaggtgtattcttggtaggattatttgtgataatttgggctacttggctgagaaagttgtgcttcccatatgatctgtgttgcttcttgttttttcttaaggctattgtttattgttacttttctcctttttaaaaaaaaaaaaaggcagccgggcgcagtggctcacgcctgtagtcccagcactttgggaggccgaggcgggcggatcacaaggtcaagagatcgagaccatcctggccaa

SEQ ID NO: 318 - DNA, 1799 bp, Homo sapiens
ggggaggggacgattaagttccctcagagaggaagccgcgggccgactggagtcgttttcgtgctctccgcacccgcccgccgcgggtagcatcttctcagcgccccggcgcccaggaacgcccaggaaacccagtcctcctcctaagcaacctgcggcgcggggacgcccgccttttgctattattataaacgatcgcagtatgtggtagggaagtgatgctgtctgaaggtgacatcctgttctcctctcttctgtcctctccatccttattttggccacctggtttgatcttgctcttctacctagttttttatgggttcctggctgcactcttctcattcacgatgtgggttatgcttcagactctcaacgatgaggttccaaaataccgtgaccagattcctagcccaggactcatggtttttccaaaaccagtgaccgcattggaatatacattcagtaggtctgatccaacttcgtatgcagggtacattgaagaccttaagaagtttctaaaaccatatactttagaagaacagaagaacctcacagtctgtcctgatggagcactttttgaacagaagggtccagtttatgttgcatgtcagtttcctatttcattacttcaagcatgcagtggtatgaatgatcctgattttggctattctcaaggaaacccttgtattcttgtgaaaatgaacagaataattggattaaagcctgaaggagtgccaaggatagattgtgtttcaaagaatgaagatataccaaatgtagcagtttatcctcataatggaatgatagacttaaaatatttcccatattatgggaaaaaactgcatgttgggtatctacagccattggttgctgttcaggtcagctttgctcctaacaacactgggaaagaagtaacagttgagtgcaagattgatggatcagccaacctaaaaagtcaggatgatcgtgacaagtttttgggacgagttatgttcaaaatcacagcacgtgcatagtatgagtaggatatctccacagagtaaatagttttagggataaaatggtacccggccaacatcaagtgactttatagctgcaagaaatgtggtatgtggagaagttctgtatgtgaggaaggaaaaaaagaaaataaaagtgtgtttgaaaaatattatcttgggttctttgtaaaatttattttttacatgctgaattagcctcgatctttttgattaagagcacaaacttttttttgtaaaacatgtaaaaaaaaaactgggattaatttttagtgttggaactgcctcttattttaggctgtagataaaatagcatttttaggttagccagtgtgactatgcacctaattttttatgagattaaattcataagacttaatttgtacaatagtttgtgaaatatcttgttactgcttttatttagcagactgtggactgtaataaagtatataaattgtgaaatataaaaacttggaacttattcaaagcttcaaagcaaacaacagttttgtgtaagcattctttcccctccagtattaggtgtattcttggtaggattatttgtgataatttgggctacttggctgagaaagttgtgcttcccatatgatctgtgttgcttcttgttttttcttaaggctattgtttattgttacttttctcctttttaaaaaaaaaaaaaggcagccgggcgcagtggctcacgcctgtagtcccagcactttgggaggccgaggcgggcggatcacaaggtcaagagatcgagaccatcctggccaa

SEQ ID NO: 319 - DNA, 1866 bp, Homo sapiens
ggggaggggacgattaagttccctcagagaggaagccgcgggccgactggagtcgttttcgtgctctccgcacccgcccgccgcgggtagcatcttctcagcgccccggcgcccaggaacgcccaggaaacccagtcctcctcctaagcaacctgcggcgcggggacgcccgccttttgctattattataaacgatcgcagtatgtggtagggaagtgatgctgtctgaaggtgacatcctgttctcctctcttctgtcctctccatccttattttggccacctggtttgatcttgctcttctacctagttttttatgggttcctggctgcactcttctcattcacgatgtgggttatgcttcagactctcaacgatgaggttccaaaataccgtgaccagattcctagcccaggactcatggtttttccaaaaccagtgaccgcattggaatatacattcagtaggtctgatccaacttcgtatgcagggtacattgaagaccttaagaagtttctaaaaccatatactttagaagaacagaagaacctcacagtctgtcctgatggagcactttttgaacagaagggtccagtttatgttgcatgtcagtttcctatttcattacttcaagcatgcagtggtatgaatgatcctgattttggctattctcaaggaaacccttgtattcttgtgaaaatgaacagaataattggattaaagcctgaaggagtgccaaggatagattgtgtttcaaagaatgaagatataccaaatgtagcagtttatcctcataatggaatgatagacttaaaatatttcccatattatgggaaaaaactgcatgttgggtatctacagccattggttgctgttcaggtcagctttgctcctaacaacactgggaaagaataactgcctgttgcctctgctgccctttgaaccagtgtacagtcgccagatagggaccggtgaacacctgattccaaacatgtaggatgggggtcttgtcctctttttatgtggtttaattgccaagtgtctaaagcttaatatgccgtgctatgtaaatattttatggatataacaactgtcatattttgatgtcaacagagttttagggataaaatggtacccggccaacatcaagtgactttatagctgcaagaaatgtggtatgtggagaagttctgtatgtgaggaaggaaaaaaagaaaataaaagtgtgtttgaaaaatattatcttgggttctttgtaaaatttattttttacatgctgaattagcctcgatctttttgattaagagcacaaacttttttttgtaaaacatgtaaaaaaaaaactgggattaatttttagtgttggaactgcctcttattttaggctgtagataaaatagcatttttaggttagccagtgtgactatgcacctaattttttatgagattaaattcataagacttaatttgtacaatagtttgtgaaatatcttgttactgcttttatttagcagactgtggactgtaataaagtatataaattgtgaaatataaaaacttggaacttattcaaagcttcaaagcaaacaacagttttgtgtaagcattctttcccctccagtattaggtgtattcttggtaggattatttgtgataatttgggctacttggctgagaaagttgtgcttcccatatgatctgtgttgcttcttgttttttcttaaggctattgtttattgttacttttctcctttttaaaaaaaaaaaaaggcagccgggcgcagtggctcacgcctgtagtcccagcactttgggaggccgaggcgggcggatcacaaggtcaagagatcgagaccatcctggccaa

SEQ ID NO: 320 - DNA, 1546 bp, Homo sapiens
gaatttctgggggcgcaccgccaagagctggggtttgatcttgctcttctacctagttttttatgggttcctggctgcactcttctcattcacgatgtgggttatgcttcagactctcaacgatgaggttccaaaataccgtgaccagattcctagcccaggactcatggtttttccaaaaccagtgaccgcattggaatatacattcagtaggtctgatccaacttcgtatgcagggtacattgaagaccttaagaagtttctaaaaccatatactttagaagaacagaagaacctcacagtctgtcctgatggagcactttttgaacagaagggtccagtttatgttgcatgtcagtttcctatttcattacttcaagcatgcagtggtatgaatgatcctgattttggctattctcaaggaaacccttgtattcttgtgaaaatgaacagaataattggattaaagcctgaaggagtgccaaggatagattgtgtttcaaagaatgaagatataccaaatgtagcagtttatcctcataatggaatgatagacttaaaatatttcccatattatgggaaaaaactgcatgttgggtatctacagccattggttgctgttcaggtcagctttgctcctaacaacactgggaaagaagtaacagttgagtgcaagattgatggatcagccaacctaaaaagtcaggatgatcgtgacaagtttttgggacgagttatgttcaaaatcacagcacgtgcatagtatgagtaggatatctccacagagtaaatagttttagggataaaatggtacccggccaacatcaagtgactttatagctgcaagaaatgtggtatgtggagaagttctgtatgtgaggaaggaaaaaaagaaaataaaagtgtgtttgaaaaatattatcttgggttctttgtaaaatttattttttacatgctgaattagcctcgatctttttgattaagagcacaaacttttttttgtaaaacatgtaaaaaaaaaactgggattaatttttagtgttggaactgcctcttattttaggctgtagataaaatagcatttttaggttagccagtgtgactatgcacctaattttttatgagattaaattcataagacttaatttgtacaatagtttgtgaaatatcttgttactgcttttatttagcagactgtggactgtaataaagtatataaattgtgaaatataaaaacttggaacttattcaaagcttcaaagcaaacaacagttttgtgtaagcattctttcccctccagtattaggtgtattcttggtaggattatttgtgataatttgggctacttggctgagaaagttgtgcttcccatatgatctgtgttgcttcttgttttttcttaaggctattgtttattgttacttttctcctttttaaaaaaaaaaaaaggcagccgggcgcagtggctcacgcctgtagtcccagcactttgggaggccgaggcgggcggatcacaaggtcaagagatcgagaccatcctggccaa

SEQ ID NO: 321 - DNA, 1858 bp, Homo sapiens
gtttgatcttgctcttctacctagttttttatgggttcctggctgcactcttctcattcacgatgtgggttatgcttcagactctcaacgatgaggttccaaaataccgtgaccagattcctagcccaggactcatggtttttccaaaaccagtgaccgcattggaatatacattcagtaggtctgatccaacttcgtatgcagggtacattgaagaccttaagaagtttctaaaaccatatactttagaagaacagaagaacctcacagtctgtcctgatggagcactttttgaacagaagggtccagtttatgttgcatgtcagtttcctatttcattacttcaagcatgcagtggtatgaatgatcctgattttggctattctcaaggaaacccttgtattcttgtgaaaatgaacagaataattggattaaagcctgaaggagtgccaaggatagattgtgtttcaaagaatgaagatataccaaatgtagcagtttatcctcataatggaatgatagacttaaaatatttcccatattatgggaaaaaactgcatgttgggtatctacagccattggttgctgttcaggtcagctttgctcctaacaacactgggaaagaagtaacagttgagtgcaagattgatggatcagccaacctaaaaagtcaggatgatcgtgacaagtttttgggacgagttatgttcaaaatcacagcacgtgcatagtatgagtaggatatctccacagagtaaatgttgtgttgtctgtcttcattttgtaacagctggaccttccattctagaattatgagaccaccttggagaaaggtgtgtggtacatgacattgggttacatcataacgtgcttccagatcatagtgttcagtgtcctctgaagtaactgcctgttgcctctgctgccctttgaaccagtgtacagtcgccagatagggaccggtgaacacctgattccaaacatgtaggatgggggtcttgtcctctttttatgtggtttaattgccaagtgtctaaagcttaatatgccgtgctatgtaaatattttatggatataacaactgtcatattttgatgtcaacagagttttagggataaaatggtacccggccaacatcaagtgactttatagctgcaagaaatgtggtatgtggagaagttctgtatgtgaggaaggaaaaaaagaaaataaaagtgtgtttgaaaaatattatcttgggttctttgtaaaatttattttttacatgctgaattagcctcgatctttttgattaagagcacaaacttttttttgtaaaacatgtaaaaaaaaaactgggattaatttttagtgttggaactgcctcttattttaggctgtagataaaatagcatttttaggttagccagtgtgactatgcacctaattttttatgagattaaattcataagacttaatttgtacaatagtttgtgaaatatcttgttactgcttttatttagcagactgtggactgtaataaagtatataaattgtgaaatataaaaacttggaacttattcaaagcttcaaagcaaacaacagttttgtgtaagcattctttcccctccagtattaggtgtattcttggtaggattatttgtgataatttgggctacttggctgagaaagttgtgcttcccatatgatctgtgttgcttcttgttttttcttaaggctattgtttattgttacttttctcctttttaaaaaaaaaaaaaggcagccgggcgcagtggctcacgcctgtagtcccagcactttgggaggccgaggcgggcggatcacaaggtcaagagatcgagaccatcctggccaa

SEQ ID NO: 322 - DNA, 1679 bp, Homo sapiens
atgacgaagaacgagaagaagtccctcaaccagagcctggccgagtggaagctcttcatctacaacccgaccaccggagaattcctggggcgcaccgccaagagctggggtttgatcttgctcttctacctagttttttatgggttcctggctgcactcttctcattcacgatgtgggttatgcttcagactctcaacgatgaggttccaaaataccgtgaccagattcctagcccaggactcatggtttttccaaaaccagtgaccgcattggaatatacattcagtaggtctgatccaacttcgtatgcagggtacattgaagaccttaagaagtttctaaaaccatatactttagaagaacagaagaacctcacagtctgtcctgatggagcactttttgaacagaagggtccagtttatgttgcatgtcagtttcctatttcattacttcaagcatgcagtggtatgaatgatcctgattttggctattctcaaggaaacccttgtattcttgtgaaaatgaacagaataattggattaaagcctgaaggagtgccaaggatagattgtgtttcaaagaatgaagatataccaaatgtagcagtttatcctcataatggaatgatagacttaaaatatttcccatattatgggaaaaaactgcatgttgggtatctacagccattggttgctgttcaggtcagctttgctcctaacaacactgggaaagaagtaacagttgagtgcaagattgatggatcagccaacctaaaaagtcaggatgatcgtgacaagtttttgggacgagttatgttcaaaatcacagcacgtgcatagtatgagtaggatatctccacagagtaaatgttgtgttgtctgtcttcattttgtaacagctggaccttccattctagaattatgagaccaccttggagaaaggtgtgtggtacatgacattgggttacatcataacgtgcttccagatcatagtgttcagtgtcctctgaagtaactgcctgttgcctctgctgccctttgaaccagtgtacagtcgccagatagggaccggtgaacacctgattccaaacatgtaggatgggggtcttgtcctctttttatgtggtttaattgccaagtgtctaaagcttaatatgccgtgctatgtaaatattttatggatataacaactgtcatattttgatgtcaacagagttttagggataaaatggtacccggccaacatcaagtgactttatagctgcaagaaatgtggtatgtggagaagttctgtatgtgaggaaggaaaaaaagaaaataaaagtgtgtttgaaaaatattatcttgggttctttgtaaaatttattttttacatgctgaattagcctcgatctttttgattaagagcacaaacttttttttgtaaaacatgtaaaaaaaaaaactgggattaatttttagtgttggaactgcctcttattttaggctgtagataaaatagcatttttaggttagccagtgtgactatgcacctaattttttatgagattaaattcataagacttaatttgtacaatagtttgtgaaatatcttgttactgcttttatttagcagactgtggactgtaataaagtatataaattgtgaaatataaaaacttggaacttattcaaagctt

SEQ ID NO: 323 - DNA, 3583 bp, Homo sapiens
ctcagttcacagacaatggccagatcatcttcccagagtcagactaccagattttctcctaccccaacccactcccaacaggcttcacaggccgggaccctgtggccctggtggctccgttctgggacgatgctgacttctccactggtcgggggaccacattttatcaggaatacgagacgttctatggtgaacacagcctgctagtccagcaggccgagtcttggattagaaagatcacaaacaacgggggctacaaggccaggtgggccctaaaggtcacgtgggtcaatgcccacgcctatcctgcccagtggaccctcgggagcaacacctaccaagccatcctctccacggacgggagcaggtcctatgccctgtttctctaccagagcggtgggatgcagtgggacgtggcccagcgctcaggcaagccggtgctcatgggcttctctagtggagatggctatttcgaaaacagcccactgatgtcccagccagtgtgggagaggtatcgccctgatagattcctgaattccaactcaggcctccaagggctgcagttctacaggctacaccgggaagaaaggcccaactaccgtctcgagtgcctgcagtggctgaagagccagcctcggtggcccagctggggctggaaccaggtctcctgcccttgttcctggcagcagggacgacgggacttacgattccaacccgtcagcataggtcgctggggcctcggcagtaggcagctgtgcagcttcacctcttggcgaggaggcgtgtgctgcagctacgggccctggggagagtttcgtgaaggctggcacgtgcagcgtccttggcagttggcccaggaactggagccacagagctggtgctgccgctggaatgacaagccctacctctgtgccctgtaccagcagaggcggccccacgtgggctgtgctacatacaggcccccacagcccgcctggatgttcggggacccccacatcaccaccttggatggtgtcagttacaccttcaatgggctgggggacttcctgctggtcggggcccaagacgggaactcctccttcctgcttcagggccgcaccgcccagactggctcagcccaggccaccaacttcatcgcctttgcggctcagtaccgctccagcagcctgggccccgtcacggtccaatggctccttgagcctcacgacgcaatccgtgtcctgctggataaccagactgtgacatttcagcctgaccatgaagacggcggaggccaggagacgttcaacgccaccggagtcctcctgagccgcaacggctctgaggtctccgccagcttcgacggctgggccaccgtctcggtgatcgcgctctccaacatcctccactcctccgccagcctcccgcccgagtaccagaaccgcacggaggggctcctgggggtctggaataacaatccagaggacgacttcaggatgcccaatggctccaccattcccccagggagccctgaggagatgcttttccactttggaatgacctggcagatcaacgggacaggcctccttggcaagaggaatgaccagctgccttccaacttcacccctgttttctactcacaactgcaaaaaaacagctcctgggctgaacatttgatctccaactgtgacggagatagctcatgcatctatgacaccctggccctgcgcaacgcaagcatcggacttcacacgagggaagtcagtaaaaactacgagcaggcgaacgccaccctcaatcagtacccgccctccatcaatggtggtcgtgtgattgaagcctacaaggggcagaccacgctgattcagtacaccagcaatgctgaggatgccaacttcacgctcagagacagctgcaccgacttggagctctttgagaatgggacgttgctgtggacacccaagtcgctggagccattcactctggagattctagcaagaagtgccaagattggcttggcatctgcactccagcccaggactgtggtctgccattgcaatgcagagagccagtgtttgtacaatcagaccagcagggtgggcaactcctccctggaggtggctggctgcaagtgtgacgggggcaccttcggccgctactgcgagggctccgaggatgcctgtgaggagccgtgcttcccgagtgtccactgcgttcctgggaagggctgcgaggcctgccctccaaacctgactggggatgggcggcactgtgcggctctggggagctctttcctgtgtcagaaccagtcctgccctgtgaattactgctacaatcaaggccactgctacatctcccagactctgggctgtcagcccatgtgcacctgccccccagccttcactgacagccgctgcttcctggctgggaacaacttcagtccaactgtcaacctagaacttcccttaagagtcatccagctcttgctcagtgaagaggaaaatgcctccatggcagaggtcaacgcctcggtggcatacagactggggaccctggacatgcgggcctttctccgcaacagccaagtggaacgaatcgattctgcagcaccggcctcgggaagccccatccaacactggatggtcatctcggagttccagtaccgccctcggggcccggtcattgacttcctgaacaaccagctgctggccgcggtggtggaggcgttcttataccacgttccacggaggagtgaggagcccaggaacgacgtggtcttccagcccatttccggggaagacgtgcgcgatgtgacagccctgaacgtgagcacgctgaaggcttacttcagatgcgatggctacaagggctacgacctggtctacagcccccagagcggcttcacctgcgtgtccccgtgcagtaggggctactgtgaccatggaggccagtgccagcacctgcccagtgggccccgctgcagctgtgtgtccttctccatctacacggcctggggcgagcactgtgagcacctgagcatgaaactcgacgcgttcttcggcatcttctttggggccctgggcggcctcttgctgctgggggtcgggacgttcgtggtcctgcgcttctggggttgctccggggccaggttctcctatttcctgaactcagctgaggccttgccttgaaggggcagctgtggcctaggctacctcaagactcacctcatccttaccgcacatttaaggcgccattgcttttgggagactggaaaagggaaggtgactgaaggctgtcaggattcttcaaggagaatgaatactgggaatcaagacaagactataccttatccataggcgcaggtgcacagggggaggccataaagatcaaacatgcatggatgggtcctcacgcagacacacccacagaaggacactagcctgtgcacgcgcgcgtgcacacacacacacacacaagagttcataatgtggtgatggccctaagttaagcaaaatgcttctgcacacaaaactctctggtttacttcaaattaactctatttaaataaagtctctctgactttttgtgtcttcaaaaccaggaa

SEQ ID NO: 324 - DNA, 3583 bp, Homo sapiens; identical to SEQ ID NO: 323

SEQ ID NO: 325 - DNA, 2910 bp, Homo sapiens
ctcagttcacagacaatggccagatcatcttcccagagtcagactaccagattttctcctaccccaacccactcccaacaggcttcacaggccgggaccctgtggccctggtggctccgttctgggacgatgctgacttctccactggtcgggggaccacattttatcaggaatacgagacgttctatggtgaacacagcctgctagtccagcaggccgagtcttggattagaaagatcacaaacaacgggggctacaaggccaggtgggccctaaaggtcacgtgggtcaatgcccacgcctatcctgcccagtggaccctcgggagcaacacctaccaagccatcctctccacggacgggagcaggtcctatgccctgtttctctaccagagcggtgggatgcagtgggacgtggcccagcgctcaggcaagccggtgctcatgggcttctctagtggagatggctatttcgaaaacagcccactgatgtcccagccagtgtgggagaggtatcgccctgatagattcctgaattccaactcaggcctccaagggctgcagttctacaggctacaccgggaagaaaggcccaactaccgtctcgagtgcctgcagtggctgaagagccagcctcggtggcccagctggggctggaaccaggtctcctgcccttgttcctggcagcagggacgacgggacttacgattccaacccgtcagcatagcctcccgcccgagtaccagaaccgcacggaggggctcctgggggtctggaataacaatccagaggacgacttcaggatgcccaatggctccaccattcccccagggagccctgaggagatgcttttccactttggaatgacctggcagatcaacgggacaggcctccttggcaagaggaatgaccagctgccttccaacttcacccctgttttctactcacaactgcaaaaaaacagctcctgggctgaacatttgatctccaactgtgacggagatagctcatgcatctatgacaccctggccctgcgcaacgcaagcatcggacttcacacgagggaagtcagtaaaaactacgagcaggcgaacgccaccctcaatcagtacccgccctccatcaatggtggtcgtgtgattgaagcctacaaggggcagaccacgctgattcagtacaccagcaatgctgaggatgccaacttcacgctcagagacagctgcaccgacttggagctctttgagaatgggacgttgctgtggacacccaagtcgctggagccattcactctggagattctagcaagaagtgccaagattggcttggcatctgcactccagcccaggactgtggtctgccattgcaatgcagagagccagtgtttgtacaatcagaccagcagggtgggcaactcctccctggaggtggctggctgcaagtgtgacgggggcaccttcggccgctactgcgagggctccgaggatgcctgtgaggagccgtgcttcccgagtgtccactgcgttcctgggaagggctgcgaggcctgccctccaaacctgactggggatgggcggcactgtgcggctctggggagctctttcctgtgtcagaaccagtcctgccctgtgaattactgctacaatcaaggccactgctacatctcccagactctgggctgtcagcccatgtgcacctgccccccagccttcactgacagccgctgcttcctggctgggaacaacttcagtccaactgtcaacctagaacttcccttaagagtcatccagctcttgctcagtgaagaggaaaatgcctccatggcagaggtcaacgcctcggtggcatacagactggggaccctggacatgcgggcctttctccgcaacagccaagtggaacgaatcgattctgcagcaccggcctcgggaagccccatccaacactggatggtcatctcggagttccagtaccgccctcggggcccggtcattgacttcctgaacaaccagctgctggccgcggtggtggaggcgttcttataccacgttccacggaggagtgaggagcccaggaacgacgtggtcttccagcccatttccggggaagacgtgcgcgatgtgacagccctgaacgtgagcacgctgaaggcttacttcagatgcgatggctacaagggctacgacctggtctacagcccccagagcggcttcacctgcgtgtccccgtgcagtaggggctactgtgaccatggaggccagtgccagcacctgcccagtgggccccgctgcagctgtgtgtccttctccatctacacggcctggggcgagcactgtgagcacctgagcatgaaactcgacgcgttcttcggcatcttctttggggccctgggcggcctcttgctgctgggggtcgggacgttcgtggtcctgcgcttctggggttgctccggggccaggttctcctatttcctgaactcagctgaggccttgccttgaaggggcagctgtggcctaggctacctcaagactcacctcatccttaccgcacatttaaggcgccattgcttttgggagactggaaaagggaaggtgactgaaggctgtcaggattcttcaaggagaatgaatactgggaatcaagacaagactataccttatccataggcgcaggtgcacagggggaggccataaagatcaaacatgcatggatgggtcctcacgcagacacacccacagaaggacactagcctgtgcacgcgcgcgtgcacacacacacacacacaagagttcataatgtggtgatggccctaagttaagcaaaatgcttctgcacacaaaactctctggtttacttcaaattaactctatttaaataaagtctctctgactttttgtgtcttcaaaaccaggaa

SEQ ID NO: 326 - DNA, 3990 bp, Homo sapiens
ggagcttccccagggagccagggggacttttgccgcagccatgaagggggcacgctggaggagggtcccctgggtgtccctgagctgcctgtgtctctgcctccttccgcatgtggtcccaggaatgacaacaccgtcactgaagacagacggtgggagacgcacagccacatcaccaccccccacaacctcccagaccatcatttccaccattcccagcactgccatgcacacccgctccacagctgcccccatccccatcctgcctgagagaggagtttccctcttcccctatggggcagacgccggggacctggagttcgtcaggaggaccgtggacttcacctccccactcttcaagccggcgactggcttcccccttggctcctctctccgtgattccctctacttcacagacaatggccagatcatcttcccagagtcagactaccagattttctcctaccccaacccactcccaacaggcttcacaggccgggaccctgtggccctggtggctccgttctgggacgatgctgacttctccactggtcgggggaccacattttatcaggaatacgagacgttctatggtgaacacagcctgctagtccagcaggccgagtcttggattagaaagatcacaaacaacgggggctacaaggccaggtgggccctaaaggtcacgtgggtcaatgcccacgcctatcctgcccagtggaccctcgggagcaacacctaccaagccatcctctccacggacgggagcaggtcctatgccctgtttctctaccagagcggtgggatgcagtgggacgtggcccagcgctcaggcaacccggtgctcatgggcttctctagtggagatggctatttcgaaaacagcccactgatgtcccagccagtgtgggagaggtatcgccctgatagattcctgaattccaactcaggcctccaagggctgcagttctacaggctacaccgggaagaaaggcccaactaccgtctcgagtgcctgcagtggctgaagagccagcctcggtggcccagctggggctggaaccaggtctcctgcccttgttcctggcagcagggacgacgggacttacgattccaacccgtcagcataggtcgctggggcctcggcagtaggcagctgtgcagcttcacctcttggcgaggaggcgtgtgctgcagctacgggccctggggagagtttcgtgaaggctggcacgtgcagcgtccttggcagttggcccaggaactggagccacagagctggtgctgccgctggaatgacaagccctacctctgtgccctgtaccagcagaggcggccccacgtgggctgtgctacatacaggcccccacagcccgcctggatgttcggggacccccacatcaccaccttggatggtgtcagttacaccttcaatgggctgggggacttcctgctggtcggggcccaagacgggaactcctccttcctgcttcagggccgcaccgcccagactggctcagcccaggccaccaacttcatcgcctttgcggctcagtaccgctccagcagcctgggccccgtcacggtccaatggctccttgagcctcacgacgcaatccgtgtcctgctggataaccagactgtgacatttcagcctgaccatgaagacggcggaggccaggagacgttcaacgccaccggagtcctcctgagccgcaacggctctgaggtctcggccagcttcgacggctgggccaccgtctcggtgatcgcgctctccaacatcctccacgcctccgccagcctcccgcccgagtaccagaaccgcacggaggggctcctgggggtctggaataacaatccagaggacgacttcaggatgcccaatggctccaccattcccccagggagccctgaggagatgcttttccactttggaatgacctggcagatcaacgggacaggcctccttggcaagaggaatgaccagctgccttccaacttcacccctgttttctactcacaactgcaaaaaaacagctcctgggctgaacatttgatctccaactgtgacggagatagctcatgcatctatgacaccctggccctgcgcaacgcaagcatcggacttcacacgagggaagtcagtaaaaactacgagcaggcgaacgccaccctcaatcagtacccgccctccatcaatggtggtcgtgtgattgaagcctacaaggggcagaccacgctgattcagtacaccagcaatgctgaggatgccaacttcacgctcagagacagctgcaccgacttggagctctttgagaatgggacgttgctgtggacacccaagtcgctggagccattcactctggagattctagcaagaagtgccaagattggcttggcatctgcactccagcccaggactgtggtctgccattgcaatgcagagagccagtgtttgtacaatcagaccagcagggtgggcaactcctccctggaggtggctggctgcaagtgtgacgggggcaccttcggccgctactgcgagggctccgaggatgcctgtgaggagccgtgcttcccgagtgtccactgcgttcctgggaagggctgcgaggcctgccctccaaacctgactggggatgggcggcactgtgcggctctggggagctctttcctgtgtcagaaccagtcctgccctgtgaattactgctacaatcaaggccactgctacatctcccagactctgggctgtcagcccatgtgcacctgccccccagccttcactgacagccgctgcttcctggctgggaacaacttcagtccaactgtcaacctagaacttcccttaagagtcatccagctcttgctcagtgaagaggaaaatgcctccatggcagaggtcaacgcctcggtggcatacagactggggaccctggacatgcgggcctttctccgcaacagccaagtggaacgaatcgattctgcagcaccggcctcgggaagccccatccaacactggatggtcatctcggagttccagtaccgccctcggggcccggtcattgacttcctgaacaaccagctgctggccgcggtggtggaggcgttcttataccacgttccacggaggagtgaggagcccaggaacgacgtggtcttccagcccatctccgaggaagacgtgcgcgatgtgacagccctgaacgtgagcacgctgaaggcttacttcagatgcgatggctacaagggctacgacctggtctacagcccccagagcggcttcacctgcgtgtccccgtgcagtaggggctactgtgaccatggaggccagtgccaacacctgcccagtgggccccgctgcagctgtgtgtccttctccatctacacggcctggggcgagcactgtgagcacctgagcatgaaactcgacgcgttcttcggcatcttctttggggccctgggcggcctcttgctgctgggggtcgggacgttcgtggtcctgcgcttctggggttgctccggggccaggttctcctatttcctgaactcagctgaggccttgccttgaaggggcagctgtggcctaggctacctcaagactcacctcatccttaccgcacatttaaggcgccattgcttttgggagactggaaaagggaaggtgactgaaggctgtcaggattcttcaaggagaatgaatactgggaatcaagacaggactataccttatccataggcgcaggtgcacagggggaggccataaagatcaaacatgcatggatgggtcctcacgcagacacacccacagaaggacactagcctggcgcgcgtgcacacacacacacacacacacgagttcataatgtggtgatggccctaagttaagcaaaatgcttctgcacacaaaactctctggtttacttcaaattaactctatttaaataaagtctctctgactttttgtgtctccaaaaaaaaaaaaaaaaa

SEQ ID NO: 327 - DNA, 3631 bp, Homo sapiens
gcttcccatacggcagtggctgggggagagtgatggagagaaaggctaagctaaggtcaaagaaagtggaggaaggctggcttgtcccgctggacttgacggcggagctgctgcaatctcgcgggctgggcccttgccccgggtggacccgagtgcctgcggggaggcgggtgtggctcccccgggaggtgacagctggcggggcccgtaaggagctggtctgctccggctcccctctcgtagccggcgccctgggaccagcgcgtgagcacgtctcggaggagtccgatgcgctgggcagggccgggtggtcacccccgcccagcttccaggggtgactgtgcctctgacgtcagacggtttttgggtcattccctggcacggggactttattttcataacagcatgaagtgccgtggaactggaataggcgtgtcctctccctcgaccctccccctccttgtccctctgctcacccctcgctcgttccctccctccggcgagggccgcctttataacaactgctcagagtgcgagggcgggatagctgtccaaggtctcccccagcactgaggagctcgcctgctgccctcttgcgcgcgggaagcagcaccaagttcacggccaacgccttggcactagggtccagaatggctacaacagtccctgatggttgccgcaatggcctgaaatccaagtactacagactttgtgataaggctgaagcttggggcatcgtcctagaaacggtggccacagccggggttgtgacctcggtggccttcatgctcactctcccgatcctcgtctgcaaggtgcaggactccaacaggcgaaaaatgctgcctactcagtttctcttcctcctgggtgtgttgggcatctttggcctcaccttcgccttcatcatcggactggacgggagcacagggcccacacgcttcttcctctttgggatcctcttttccatctgcttctcctgcctgctggctcatgctgtcagtctgaccaagctcgtccgggggaggaagcccctttccctgttggtgattctgggtctggccgtgggcttcagcctagtccaggatgttatcgctattgaatatattgtcctgaccatgaataggaccaacgtcaatgtcttttctgagctttccgctcctcgtcgcaatgaagactttgtcctcctgctcacctacgtcctcttcttgatggcgctgaccttcctcatgtcctccttcaccttctgtggttccttcacgggctggaagagacatggggcccacatctacctcacgatgctcctctccattgccatctgggtggcctggatcaccctgctcatgcttcctgactttgaccgcaggtgggatgacaccatcctcagctccgccttggctgccaatggctgggtgttcctgttggcttatgttagtcccgagttttggctgctcacaaagcaacgaaaccccatggattatcctgttgaggatgctttctgtaaacctcaactcgtgaagaagagctatggtgtggagaacagagcctactctcaagaggaaatcactcaaggttttgaagagacaggggacacgctctatgccccctattccacacattttcagctgcagaaccagcctccccaaaaggaattctccatcccacgggcccacgcttggccgagcccttacaaagactatgaagtaaagaaagagggcagctaactctgtcctgaagagtgggacaaatgcagccgggcggcagatctagcgggagctcaaagggatgtgggcgaaatcttgagtcttctgagaaaactgtacaagacactacgggaacagtttgcctccctcccagcctcaaccacaattcttccatgctggggctgatgtgggctagtaagactccagttcttagaggcgctgtagtatttttttttttttgtctcatcctttggatacttcttttaagtgggagtctcaggcaactcaagtttagacccttactctttttgtttgttttttgaaacaggatcttgctctgtcacccaggcttgagtgcagtggtgcgatcacagcccagtgcagcctcgaccacctgtgctcaagcaatcctcccatctccatctcccaaagtgctgggatgacaggcgtgagccacagctcccagcctaggcccttaatcttgctgttattttccatggactaaaggtctggtcatctgagctcacgctggctcacacagctctaggggcctgctcctctaactcacagtgggttttgtgaggctctgtggcccagagcagacctgcatatctgagcaaaaatagcaaaagcctctctcagcccactggcctgaatctacactggaagccaacttgctggcacccccgctccccaacccttcttgcctgggtaggagaggctaaagatcaccctaaatttactcatctctctagtgctgcctcacattgggcctcagcagctccccagcaccaattcacaggtcacccctctcttcttgcactgtccccaaacttgctgtcaattccgagatctaatctccccctacgctctgccaggaattctttcagacctcactagcacaagcccggttgctccttgtcaggagaatttgtagatcattctcacttcaaattcctggggctgatacttctctcatcttgcaccccaacctctgtaaatagatttaccgcatttacggctgcattctgtaagtgggcatggtctcctaatggaggagtgttcattgtataataagttattcacctgagtatgcaataaagatgtggtggccactctttcatggtggtggcagcagttaccagtaatgagcattagactctgggggatagaacacgggctgccctgagagcttcatgttggagctgaagttcaaggttcacttcctttgggtttgtacttgacccttcttcatgtgtctctcccgttccctctaaaacaagtgtgtttcccctcatttttgaggctgtcaatggtgtgagagccaggatcatcacggggcctgaggttttactccagaaaagcagaggagtggcaaccttggcttggggtttggcagcccaggaaaggcagggaggagagctcaaagccggtttcatgtttcacccaaggtctaattgtgggagaggacaaatccagatcccctgtttgacagaattagttcacaaatgtctcttggcaaaaacatgtgacacctaaccatgataattgacttaatccaagaaagagctctgtagggcagagcaataggaaatctctctttcgttatggaaaaaaaataatccctctacatagaaactgagtgacatgtaaaaatgtgtagctaagtcagggagttacttcctaagagcctgacgctctgcttttcatcaaaaggaaaaaccagcgtgaggcagaggcgagggaggtggaggtgagtggatgatgtgctgagttagggatgtttatatgccgcaaaggtttggttggtaggcttcgcgctaagattagcctggctttgtactgaaaagggggaaggacacatagtgacacagatccttctggtctttcccaggaggtgtgacctaatgaggtttgttgtgagaata

SEQ ID NO: 328 - DNA, 2297 bp, Homo sapiens
atagctgtccaaggtctcccccagcactgaggagctcgcctgctgccctcttgcgcgcgggaagcagcaccaagttcacggccaacgccttggcactagggtccagaatggctacaacagtccctgatggttgccgcaatggcctgaaatccaagtactacagactttgtgataaggctgaagcttggggcatcgtcctagaaacggtggccacagccggggttgtgacctcggtggccttcatgctcactctcccgatcctcgtctgcaaggtgcaggactccaacaggcgaaaaatgctgcctactcagtttctcttcctcctgggtgtgttgggcatctttggcctcaccttcgccttcatcatcggactggacgggagcacagggcccacacgcttcttcctctttgggatcctcttttccatctgcttctcctgcctgctggctcatgctgtcagtctgaccaagctcgtccgggggaggaagcccctttccctgttggtgattctgggtctggccgtgggcttcagcctagtccaggatgttatcgctattgaatatattgtcctgaccatgaataggaccaacgtcaatgtcttttctgagctttccgctcctcgtcgcaatgaagactttgtcctcctgctcacctacgtcctcttcttgatggcgctgaccttcctcatgtcctccttcaccttctgtggttccttcacgggctggaagagacatggggcccacatctacctcacgatgctcctctccattgccatctgggtggcctggatcaccctgctcatgcttcctgactttgaccgcaggtgggatgacaccatcctcagctccgccttggctgccaatggctgggtgttcctgttggcttatgttagtcccgagttttggctgctcacaaagcaacgaaaccccatggattatcctgttgaggatgctttctgtaaacctcaactcgtgaagaagggctatggtgtggagaacagagcctactctcaagaggaaatcactcaaggttttgaagagacaggggacacgctctatgccccctattccacacattttcagctgcagaaccagcctccccaaaaggaattctccatcccacgggcccacgcttggccgagcccttacaaagactatgaagtaaagaaagagggcagctaactctgtcctgaagagtgggacaaatgcagccgggcggcagatctagcgggagctcaaagggatgtgggcgaaatcttgagtcttctgagaaaactgtacaagacactacgggaacagtttgcctccctcccagcctcaaccacaattcttccatgctggggctgatgtgggctagtaagactccagttcttagaggcgctgtagtatttttttttttttgtctcatcctttggatacttcttttaagtgggagtctcaggcaactcaagtttagacccttactctttttgtttgttttttgaaacaggatcttgctctgtcacccaggcttgagtgcagtggtgcgatcacagcccagtgcagcctcgaccacctgtgctcaagcaatcctcccatctccatctcccaaagtgctgggatgacaggcgtgagccacagctcccagcctaggcccttaatcttgctgttattttccatggactaaaggtctggtcatctgagctcacgctggctcacacagctctaggggcctgctcctctaactcacagtgggttttgtgaggctctgtggcccagagcagacctgcatatctgagcaaaaatagcaaaagcctctctcagcccactggcctgaatctacactggaagccaacttgctggcacccccgctccccaacccttcttgcctgggtaggataggctaaagatcaccctaaatttactcatctctctagtgctgcctcacattgggcctcagcagctccccagcaccaattcacaggtcacccctctcttcttgcactgtccccaaacttgctgtcaattccgagatctaatctccccctacgctctgccaggaattctttcagacctcactagcacaagcccggttgctccttgtcaggagaatttgtagatcattctcacttcaaattcctggggctgatacttctctcatcttgcaccccaacctctgtaaatagatttaccgcatttacggctgcattctgtaagtgggcatggtctcctaatggaggagtgttcattgtataataagttattcacctgagtatgcaataaagatgtggtggccactcaaaaaaaaaaaaaaaaaaa

SEQ ID NO: 329 - DNA, 1098 bp, Homo sapiens
atggccagtacagagtcctccctgttgagatccctaggcctcagcccaggtcctggcagcagtgaggtggagctggactgttggtttgatgaggatttcaagttcatcctgctgcctgtgagctatgcagttgtctttgtgctgggcttgggccttaacgccccaaccctatggctcttcatcttccgcctccgaccctgggatgcaacggccacctacatgttccacctggcattgtcagacaccttgtatgtgctgtcgctgcccaccctcatctactattatgcagcccacaaccactggccctttggcactgagatctgcaagttcgtccgctttcttttctattggaacctctactgcagtgtccttttcctcacctgcatcagcgtgcaccgctacctgggcatctgccacccacttcgggcactacgctggggccgccctcgcctcgcaggccttctctgcctggcagtttggttggtcgtagccggctgcctcgtgcccaacctgttctttgtcacaaccagcaacaaagggaccaccgtcctgtgccatgacaccactcggcctgaagagtttgaccactatgtgcacttcagctcggcggtcatggggctgctctttggcgtgccctgcctggtcactcttgtttgctatggactcatggctcgtcgcctgtatcagcccttgccaggctctgcacagtcgtcttctcgcctccgctctctccgcaccatagctgtggtgctgactgtctttgctgtctgcttcgtgcctttccacatcacccgcaccatttactacctggccaggctgttggaagctgactgccgagtactgaacattgtcaacgtggtctataaagtgactcggcccctggccagtgccaacagctgcctggatcctgtgctctacttgctcactggggacaaatatcgacgtcagctccgtcagctctgtggtggtggcaagccccagccccgcacggctgcctcttccctggcactagtgtccctgcctgaggatagcagctgcaggtgggcggccaccccccaggacagtagctgctctactcctagggcagatagattgtaa

SEQ ID NO: 330 - DNA, 2665 bp, Homo sapiens
ggccccagcggactcccgggctccggtgctcggggctcggggcttgggcgtcgccggcgagcgcatgcccttccctgaagcgcggcctcttggcctggagctgggaccagttaggtaacggccccaggggcccgcagtggagagtgagcggggctttccctgccgggccagcccggcgcgctcgcccctggctgggcaggttactcactataaacaatatccacccaacacaagcaaagtttattcctactttgaatgccgtgaaaagaagacagaaaactccaaattaaggaaggtgaaatatgaggaaacagtattttatgggttgcagtacattcttaataagtacttaaaaggtaaagtagtaaccaaagagaaaatccaggaagccaaagatgtctacaaagaacatttccaagatgatgtcgttaatgaaaaaggatggaactacattcttgagaaatatgatgggcatcttccaatagaaataaaagctgttcctgaaggctttgtcattcccagaggaaatgttctcttcacggtggaaaacacagatccagagtgttactggcttacaaattggattgagactattcttgttcagtcctggtatccaatcacagtggccacaaattctagagagcagaagaaaatattggccaaatatttgttagaaacttctggtaacttagatggtctggaatacaagttacatgattttggctacagaggagtctcttcccaagagactgctggcataggagcatctgctcatttggttaacttcaaaggaacagatacagtagcaggacttgctctaaataaaaaatattatggaacgaaagatcctgttccaggctattctgttccagcagcagaacacagtaccataacagcttgggggaaagaccatgaaaaagatgcttttgaacatattgtaacacagttttcatcagtgcctgtatctgtggtcagcaatagctatgacatttataatgcgtgtgagaaaatatggggtgaagatctaagacatttaatagtatcgagaagtacacaggcaccactaataatcagacctgattctggaaaccctcttgacactgtgttaaaggttttggagattttaggtaagaagtttcctgttactgagaactcaaagggttacaagttgctgccaccttatcttagagttattcaaggggatggagtagatattaataccttacaagagattgtagaaggcatgaaacaaaaaatgtggagtattgaaaatattgccttcggttctggtggaggtttgctacagaagttaacaagagatctcttgaattgttccttcaagtgtagctatgttgtaactaatggccttgggattaacgtcttcaaggacccggttgctgatcccaacaaaaggtccaaaaagggccgattatctttacataggacgccagcagggaattttgttacactggaagaaggaaaaggagaccttgaggaatatggtcaggatcttctccatactgtcttcaagaatggcaaggtgacaaaaagctattcatttgatgaaataagaaaaaatgcacagctgaatattgaactggaagcagcacatcattaggctttatgactgggtgtgtgttgtgtgtgtgtaatacataatgtttattgtacagatgtgtggggtttgtgttttatgacacattacagccaaattatttgttggtttatggacatactgccctttcattttttttcttttccagtgtttaggtgatctcaaattaggaaatgcatttaactatgtaaaagattagtgctaaagtaagctttttagggccctttgccaataggtagtcattcaatctggtattgatcttttcacaaataacagaactgagaaacttttatatataactgatgatcacataaaacagatttgcataaaattaccatgattgctttatgtttatatttaacttgtatttttgtacaaacaagattgtgtaagatatatttgaagtttcagtgatttaacagtctttccaacttttcatgatttttatgagcacagactttcaagaaaatacttgaaaataaattacattgccttttgtccattaatcagcaaataaaacatggccttaacaaagttgtttgtgttattgcacaatttgaaaattatgtcgggacataccctatagaattactaaccttactgccccttgtagaatatgtattaatcattctacattaaagaaaataatggttcttactggaatgtctaggcactgtacagttattatatgtcttggttgttgtattgtaccagtgaaatgccaaatttgaaaggcctgtactgcaattttatatgtcagagattgcctgtggctctaatatgcacctcaagattttaaggagataatgtttttagagagaatttctgcttccactatagaatatatacataaatgtaaaatacttacaaaagtggaagtagtgtattttaaagtaattacacttctgaatttatttttcatattctatagttggcatgacttaaatgaattactggagtgggtagtgagtgtacttatcttaaatgtttcaattctgttatattttttattaagttttttaaaaattaaattgatattaaattgtaaaa

SEQ ID NO: 331 - DNA, 1658 bp, Homo sapiens
ggccccagcggactcccgggctccggtgctcggggctcggggcttgggcgtcgccggcgagcgcatgcccttccctgaagcgcggcctcttggcctggagctgggaccagttaggtaacggccccaggggcccgcagtggagagtgagcggggctttccctgccgggccagcccggcgcgctcgcccctggctgggcaggttactcactataaacaatatccacccaacacaagcaaagtttattcctactttgaatgccgtgaaaagaagacagaaaactccaaattaaggaaggtgaaatatgaggaaacagtattttatgggttgcagtacattcttaataagtacttaaaaggtaaagtagtaaccaaagagaaaatccaggaagccaaagatgtctacaaagaacatttccaagatgatgtcgttaatgaaaaaggatggaactacattcttgagaaatatgatgggcatcttccaatagaaataaaagctgttcctgaaggctttgtcattcccagaggaaatgttctcttcacggtggaaaacacagatccagagtgttactggcttacaaattggattgagactattcttgttcagtcctggtatccaatcacagtggccacaaattctagagagcagaagaaaatattggccaaatatttgttagaaacttctggtaacttagatggtctggaatacaagttacatgattttggctacagaggagtctcttcccaagagactgctggcataggagcatctgctcatttggttaacttcaaaggaacagatacagtagcaggacttgctctaaataaaaaatattatggaacgaaagatcctgttccaggctattctgttccagcagcagaacacagtaccataacagcttgggggaaagaccatgaaaaagatgcttttgaacatattgtaacacagttttcatcagtgcctgtatctgtggtcagcaatagctatgacatttataatgcgtgtgagaaaatatggggtgaagatctaagacatttaatagtatcgagaagtacacaggcaccactaataatcagacctgattctggaaaccctcttgacactgtgttaaaggttttggagattttaggtaagaagtttcctgttactgagaactcaaagggttacaagttgctgccaccttatcttagagttattcaaggggatggagtagatattaataccttacaagagattgtagaaggcatgaaacaaaaaatgtggagtattgaaaatattgccttcggttctggtggaggtttgctacagaagttaacaagagatctcttgaattgttccttcaagtgtagctatgttgtaactaatggccttgggattaacgtcttcaaggacccggttgctgatcccaacaaaaggtccaaaaagggccgattatctttacataggacgccagcagggaattttgttacactggaagaaggaaaaggagaccttgaggaatatggtcaggatcttctccatactgtcttcaagaatggcaaggtgacaaaaagctattcatttgatgaaataagaaaaaatgcacagctgaatattgaactggaagcagcacatcattaggctttatgactgggtgtgtgttgtgtgtgtgtgtgtgcat

SEQ ID NO: 332 - DNA, 4315 bp, Homo sapiens
ccgcgccagggagctcgcggcgcgcggcccctgtcctccggcccgagatgaatcctgcggcagaagccgagttcaacatcctcctggccaccgactcctacaaggttactcactataaacaatatccacccaacacaagcaaagtttattcctactttgaatgccgtgaaaagaagacagaaaactccaaattaaggaaggtgaaatatgaggaaacagtattttatgggttgcagtacattcttaataagtacttaaaaggtaaagtagtaaccaaagagaaaatccaggaagccaaagatgtctacaaagaacatttccaagatgatgtctttaatgaaaagggatggaactacattcttgagaagtatgatgggcatcttccaatagaaataaaagctgttcctgagggctttgtcattcccagaggaaatgttctcttcacggtggaaaacacagatccagagtgttactggcttacaaattggattgagactattcttgttcagtcctggtatccaatcacagtggccacaaattctagagagcagaagaaaatattggccaaatatttgttagaaacttctggtaacttagatggtctggaatacaagttacatgattttggctacagaggagtctcttcccaagagactgctggcataggagcatctgctcacttggttaacttcaaaggaacagatacagtagcaggacttgctctaattaaaaaatattatggaacgaaagatcctgttccaggctattctgttccagcagcagaacacagtaccataacagcttgggggaaagaccatgaaaaagatgcttttgaacatattgtaacacagttttcatcagtgcctgtatctgtggtcagcgatagctatgacatttataatgcgtgtgagaaaatatggggtgaagatctaagacatttaatagtatcgagaagtacacaggcaccactaataatcagacctgattctggaaaccctcttgacactgtgttaaaggttttggagattttaggtaagaagtttcctgttactgagaactcaaagggttacaagttgctgccaccttatcttagagttattcaaggggatggagtagatattaataccttacaagagattgtagaaggcatgaaacaaaaaatgtggagtattgaaaatattgccttcggttctggtggaggtttgctacagaagttgacaagagatctcttgaattgttccttcaagtgtagctatgttgtaactaatggccttgggattaacgtcttcaaggacccagttgctgatcccaacaaaaggtccaaaaagggccgattatctttacataggacgccagcagggaattttgttacactggaggaaggaaaaggagaccttgaggaatatggtcaggatcttctccatactgtcttcaagaatggcaaggtgacaaaaagctattcatttgatgaaataagaaaaaatgcacagctgaatattgaactggaagcagcacatcattaggctttatgactgggtgtgtgttgtgtgtatgtaatacataatgtttattgtacagatgtgtggggtttgtgttttatgatacattacagccaaattatttgttggtttatggacatactgccctttcattttttttcttttccagtgtttaggtgatctcaaattaggaaatgcatttaaccatgtaaaagatgagtgctaaagtaagctttttagggccctttgccaataggtagtcattcaatctggtattgatcttttcacaaataacagaactgagaaacttttatatataactgatgatcacataaaacagatttgcataaaattaccatgattgctttatgtttatatttaacttgtatttttgtacaaacaagattgtgtaagatatatttgaagtttcagtgatttaacagtctttccaacttttcatgatttttatgagcacagactttcaagaaaatacttgaaaataaattacattgccttttgtccattaatcagcaaataaaacatggccttaacaaagttgtttgtgttattgtacaatttgaaaattatgtcgggacataccctatagaattactaaccttactgccccttgtagaatatgtattaatcattctacattaaagaaaataatggttcttactggaatgtctaggcactgtacagttattatatatcttggttgttgtattgtaccagtgaaatgccaaatttgaaaggcctgtactgcaattttatatgtcagagattgcctgtggctctaatatgcacctcaagattttaaggagataatgtttttagagagaatttctgcttccactatagaatatatacataaatgtaaaatacttacaaaagtggaagtagtgtattttaaagtaattacacttctgaatttatttttcatattctatagttggtatgacttaaatgaattactggagtgggtagtgagtgtacttaaatgtttcaattctgttatattttttattaagtttttaaaaaattaaattggatattaaattgtatggacatcatttattaattttaaactgaatgccctcaataagtaatactgaagcacattcttaaatgaagataaattatctccaatgaaaagcatgacatgtgtttcaatagaagaatcttaagttggctaaattcaaagtgcttgacatcaaaatgttctagagtgattagctactagattctgaatcatacatcacatctgactagagaccagtttctttcgaatgattcttttatgtatgtagatctgttcttctgaggcagcggttggccaactatagcccaaaggccaaatttggacttctttttataaatgcagattgtctatggctgctttcccactactccagcctaaggtaaacagctgcaatagaagccaaatgagaatcgcaaagcccaaaatgtttattaacctgccctttacacaaaattacacaaaaagtttcctgatctctgttctaagaaaaggagtgtgccttgcatttaaaaggaaatgttggtttctagggaagggaggaggctaaataattgatacggaattttcctcttttgtcttcttttttctcacttaagaatccgatactggaagactgatttagaaaagtttttaacatgacattaaatgtgaaattttaaaaattgaaaagccataaatcatctgttttaaatagttacatgagaaaatgatcactagaataacctaattagaagtgttatcttcattaaatgttttttgtaagtggtattagaaagaatatgtttttcagatggttctttaaacatgtagtgagaacaataagcattattcacttttagtaagtcttctgtaatccatgatataaaataattttaaaatgattttttaatgtatttgagtaaagatgagtagtattaagaaaaacacacatttcttcacaaaatgtgctaaggggcgtgtaaagaatcaaaagaaactattaccaataatagttttgataatcacccataattttgtgtttaaacattgaaattatagtacagacagtattctctgtgttctgtgaatttcagcagcttcagaatagagtttaatttagaaatttgcagtgaaaaaagctatctctttgttcacaaccataaatcaggagatggagattaattctattggctcttagtcacttggaactgattaattctgactttctgtcactaagcacttggtatttggccatctccattctgagcaccaaacggttaacacgaatgtccactagaactctgctgtgtgtcacccttaaatcagtctaaatcttccagacaaaagcaaatggcatttatggatttaagtcattagattttcaactgacattaattaatccctcttgattgattatatcatcaagtatttatatcttaaataggaggtaggatttctgtgttaagactcttatttgtaccctataattaaagtaaaatgttttttatgagtatcccttgttttcccttcttaaattgttatcaaacaatttttataatgaaatctatcttggaaaattagaaagaaaaatggcaaggtatttattgttctgtttgccataatttagaactcacacttaagtattttgtagttttacattcctttttaacccattcagtggagaatgtcagcttttctcccaagttgtatgttaagtctattctaatatgtactcaacatcaagttataaacatgtaataaacatggaaataaagtttagctctattagtgaagt

SEQ ID NO: 333 - DNA, 4387 bp, Homo sapiens
gtcaggaggatcaggagggacaagagggatggaggcgaaaggctggatccttaatccaggccggagacaaagccgcgccagggagctcgcggcgcgcggcccctgtcctccggcccgagatgaatcctgcggcagaagccgagttcaacatcctcctggccaccgactcctacaaggttactcactataaacaatatccacccaacacaagcaaagtttattcctactttgaatgccgtgaaaagaagacagaaaactccaaattaaggaaggtgaaatatgaggaaacagtattttatgggttgcagtacattcttaataagtacttaaaaggtaaagtagtaaccaaagagaaaatccaggaagccaaagatgtctacaaagaacatttccaagatgatgtctttaatgaaaagggatggaactacattcttgagaagtatgatgggcatcttccaatagaaataaaagctgttcctgagggctttgtcattcccagaggaaatgttctcttcacggtggaaaacacagatccagagtgttactggcttacaaattggattgagactattcttgttcagtcctggtatccaatcacagtggccacaaattctagagagcagaagaaaatattggccaaatatttgttagaaacttctggtaacttagatggtctggaatacaagttacatgattttggctacagaggagtctcttcccaagagactgctggcataggagcatctgctcacttggttaacttcaaaggaacagatacagtagcaggacttgctctaattaaaaaatattatggaacgaaagatcctgttccaggctattctgttccagcagcagaacacagtaccataacagcttgggggaaagaccatgaaaaagatgcttttgaacatattgtaacacagttttcatcagtgcctgtatctgtggtcagcgatagctatgacatttataatgcgtgtgagaaaatatggggtgaagatctaagacatttaatagtatcgagaagtacacaggcaccactaataatcagacctgattctggaaaccctcttgacactgtgttaaaggttttggagattttaggtaagaagtttcctgttactgagaactcaaagggttacaagttgctgccaccttatcttagagttattcaaggggatggagtagatattaataccttacaagagattgtagaaggcatgaaacaaaaaatgtggagtattgaaaatattgccttcggttctggtggaggtttgctacagaagttgacaagagatctcttgaattgttccttcaagtgtagctatgttgtaactaatggccttgggattaacgtcttcaaggacccagttgctgatcccaacaaaaggtccaaaaagggccgattatctttacataggacgccagcagggaattttgttacactggaggaaggaaaaggagaccttgaggaatatggtcaggatcttctccatactgtcttcaagaatggcaaggtgacaaaaagctattcatttgatgaaataagaaaaaatgcacagctgaatattgaactggaagcagcacatcattaggctttatgactgggtgtgtgttgtgtgtatgtaatacataatgtttattgtacagatgtgtggggtttgtgttttatgatacattacagccaaattatttgttggtttatggacatactgccctttcattttttttcttttccagtgtttaggtgatctcaaattaggaaatgcatttaaccatgtaaaagatgagtgctaaagtaagctttttagggccctttgccaataggtagtcattcaatctggtattgatcttttcacaaataacagaactgagaaacttttatatataactgatgatcacataaaacagatttgcataaaattaccatgattgctttatgtttatatttaacttgtatttttgtacaaacaagattgtgtaagatatatttgaagtttcagtgatttaacagtctttccaacttttcatgatttttatgagcacagactttcaagaaaatacttgaaaataaattacattgccttttgtccattaatcagcaaataaaacatggccttaacaaagttgtttgtgttattgtacaatttgaaaattatgtcgggacataccctatagaattactaaccttactgccccttgtagaatatgtattaatcattctacattaaagaaaataatggttcttactggaatgtctaggcactgtacagttattatatatcttggttgttgtattgtaccagtgaaatgccaaatttgaaaggcctgtactgcaattttatatgtcagagattgcctgtggctctaatatgcacctcaagattttaaggagataatgtttttagagagaatttctgcttccactatagaatatatacataaatgtaaaatacttacaaaagtggaagtagtgtattttaaagtaattacacttctgaatttatttttcatattctatagttggtatgacttaaatgaattactggagtgggtagtgagtgtacttaaatgtttcaattctgttatattttttattaagtttttaaaaaattaaattggatattaaattgtatggacatcatttattaattttaaactgaatgccctcaataagtaatactgaagcacattcttaaatgaagataaattatctccaatgaaaagcatgacatgtgtttcaatagaagaatcttaagttggctaaattcaaagtgcttgacatcaaaatgttctagagtgattagctactagattctgaatcatacatcacatctgactagagaccagtttctttcgaatgattcttttatgtatgtagatctgttcttctgaggcagcggttggccaactatagcccaaaggccaaatttggacttctttttataaatgcagattgtctatggctgctttcccactactccagcctaaggtaaacagctgcaatagaagccaaatgagaatcgcaaagcccaaaatgtttattaacctgccctttacacaaaattacacaaaaagtttcctgatctctgttctaagaaaaggagtgtgccttgcatttaaaaggaaatgttggtttctagggaagggaggaggctaaataattgatacggaattttcctcttttgtcttcttttttctcacttaagaatccgatactggaagactgatttagaaaagtttttaacatgacattaaatgtgaaattttaaaaattgaaaagccataaatcatctgttttaaatagttacatgagaaaatgatcactagaataacctaattagaagtgttatcttcattaaatgttttttgtaagtggtattagaaagaatatgtttttcagatggttctttaaacatgtagtgagaacaataagcattattcacttttagtaagtcttctgtaatccatgatataaaataattttaaaatgattttttaatgtatttgagtaaagatgagtagtattaagaaaaacacacatttcttcacaaaatgtgctaaggggcgtgtaaagaatcaaaagaaactattaccaataatagttttgataatcacccataattttgtgtttaaacattgaaattatagtacagacagtattctctgtgttctgtgaatttcagcagcttcagaatagagtttaatttagaaatttgcagtgaaaaaagctatctctttgttcacaaccataaatcaggagatggagattaattctattggctcttagtcacttggaactgattaattctgactttctgtcactaagcacttggtatttggccatctccattctgagcaccaaacggttaacacgaatgtccactagaactctgctgtgtgtcacccttaaatcagtctaaatcttccagacaaaagcaaatggcatttatggatttaagtcattagattttcaactgacattaattaatccctcttgattgattatatcatcaagtatttatatcttaaataggaggtaggatttctgtgttaagactcttatttgtaccctataattaaagtaaaatgttttttatgagtatcccttgttttcccttcttaaattgttatcaaacaatttttataatgaaatctatcttggaaaattagaaagaaaaatggcaaggtatttattgttctgtttgccataatttagaactcacacttaagtattttgtagttttacattcctttttaacccattcagtggagaatgtcagcttttctcccaagttgtatgttaagtctattctaatatgtactcaacatcaagttataaacatgtaataaacatggaaataaagtttagctctattagtgaagt

SEQ ID NO: 334 - DNA, 4327 bp, Homo sapiens
gtcaggaggatcaggagggacaagagggatggaggcgaaaggctggatccttaatccaggccggagacaaagccgcgccagggagctcgcggcgcgcggcccctgtcctccggcccgagatgaatcctgcggcagaagccgagttcaacatcctcctggccaccgactcctacaaggttactcactataaacaatatccacccaacacaagcaaagtttattcctactttgaatgccgtgaaaagaagacagaaaactccaaattaaggaaggtgaaatatgaggaaacagtattttatgggttgcagtacattcttaataagtacttaaaaggtaaagtagtaaccaaagagaaaatccaggaagccaaagatgtctacaaagaacatttccaagatgatgtctttaatgaaaagggatggaactacattcttgagaagtatgatgggcatcttccaatagaaataaaagctgttcctgagggctttgtcattcccagaggaaatgttctcttcacggtggaaaacacagatccagagtgttactggcttacaaattggattgagactattcttgttcagtcctggtatccaatcacagtggccacaaattctagagagcagaagaaaatattggccaaatatttgttagaaacttctggtaacttagatggtctggaatacaagttacatgattttggctacagaggagtctcttcccaagagactgctggcataggagcatctgctcacttggttaacttcaaaggaacagatacagtagcaggacttgctctaattaaaaaatattatggaacgaaagatcctgttccaggctattctgttccagcagcagaacacagtaccataacagcttgggggaaagaccatgaaaaagatgcttttgaacatattgtaacacagttttcatcagtgcctgtatctgtggtcagcgatagctatgacatttataatgcgtgtgagaaaatatggggtgaagatctaagacatttaatagtatcgagaagtacacaggcaccactaataatcagacctgattctggaaaccctcttgacactgtgttaaaggttttggagattttaggtaagaagtttcctgttactgagaactcaaagggttacaagttgctgccaccttatcttagagttattcaaggggatggagtagatattaataccttacaagagattgtagaaggcatgaaacaaaaaatgtggagtattgaaaatattgccttcggttctggtggaggtttgctacagaagttgacaagagatctcttgaattgttccttcaagtgtagctatgttgtaactaatggccttgggattaacgtcttcaaggacccagttgctgatcccaacaaaaggtccaaaaagggccgattatctttacataggacgccagcagggaattttgttacactggaggaaggaaaaggagaccttgaggaatatggtcaggatcttctccatactgtcttcaagaatggcaaggtgacaaaaagctattcatttgatgaaataagaaaaaatgcacagctgaatattgaactggaagcagcacatcattaggctttatgactgggtgtgtgttgtgtgtatgtaatacataatgtttattgtacagatgtgtggggtttgtgttttatgatacattacagccaaattatttgttggtttatggacatactgccctttcattttttttcttttccagtgtttaggtgatctcaaattaggaaatgcatttaaccatgtaaaagatgagtgctaaagtaagctttttagggccctttgccaataggtagtcattcaatctggtattgatcttttcacaaataacagaactgagaaacttttatatataactgatgatcacataaaacagatttgcataaaattaccatgattgctttatgtttatatttaacttgtatttttgtacaaacaagattgtgtaagatatatttgaagtttcagtgatttaacagtctttccaacttttcatgatttttatgagcacagactttcaagaaaatacttgaaaataaattacattgccttttgtccattaatcagcaaataaaacatggccttaacaaagttgtttgtgttattgtacaatttgaaaattatgtcgggacataccctatagaattactaaccttactgccccttgtagaatatgtattaatcattctacattaaagaaaataatggttcttactggaatgtctaggcactgtacagttattatatatcttggttgttgtattgtaccagtgaaatgccaaatttgaaaggcctgtactgcaattttatatgtcagagattgcctgtggctctaatatgcacctcaagattttaaggagataatgtttttagagagaatttctgcttccactatagaatatatacataaatgtaaaatacttacaaaagtggaagtagtgtattttaaagtaattacacttctgaatttatttttcatattctatagttggtatgacttaaatgaattactggagtgggtagtgagtgtacttaaatgtttcaattctgttatattttttattaagtttttaaaaaattaaattggatattaaattgtatggacatcatttattaattttaaactgaatgccctcaataagtaatactgaagcacattcttaaatgaagataaattatctccaatgaaaagcatgacatgtgtttcaatagaagaatcttaagttggctaaattcaaagtgcttgacatcaaaatgttctagagtgattagctactagattctgaatcatacatcacatctgactagagaccagtttctttcgaatgattcttttatgtatgtagatctgttcttctgaggcagcggttggccaactatagcccaaaggccaaatttggacttctttttataaatgcagattgtctatggctgctttcccactactccagcctaaggtaaacagctgcaatagaagccaaatgagaatcgcaaagcccaaaatgtttattaacctgccctttacacaaaattacacaaaaagtttcctgatctctgttctaagaaaaggagtgtgccttgcatttaaaaggaaatgttggtttctagggaagggaggaggctaaataattgatacggaattttcctcttttgtcttcttttttctcacttaagaatccgatactggaagactgatttagaaaagtttttaacatgacattaaatgtgaaattttaaaaattgaaaagccataaatcatctgttttaaatagttacatgagaaaatgatcactagaataacctaattagaagtgttatcttcattaaatgttttttgtaagtggtattagaaagaatatgtttttcagatggttctttaaacatgtagtgagaacaataagcattattcacttttagtaagtcttctgtaatccatgatataaaataattttaaaatgattttttaatgtatttgagtaaagatgagtagtattaagaaaaacacacatttcttcacaaaatgtgctaaggggcgtgtaaagaatcaaaagaaactattaccaataatagttttgataatcacccataattttgtgtttaaacattgaaattatagtacagacagtattctctgtgttctgtgaatttcagcagcttcagaatagagtttaatttagaaatttgcagtgaaaaaagctatctctttgttcacaaccataaatcaggagatggagattaattctattggctcttagtcacttggaactgattaattctgactttctgtcactaagcacttggtatttggccatctccattctgagcaccaaacggttaacacgaatgtccactagaactctgctgtgtgtcacccttaaatcagtctaaatcttccagacaaaagcaaatggcatttatggatttaagtcattagagtatttatatcttaaataggaggtaggatttctgtgttaagactcttatttgtaccctataattaaagtaaaatgttttttatgagtatcccttgttttcccttcttaaattgttatcaaacaatttttataatgaaatctatcttggaaaattagaaagaaaaatggcaaggtatttattgttctgtttgccataatttagaactcacacttaagtattttgtagttttacattcctttttaacccattcagtggagaatgtcagcttttctcccaagttgtatgttaagtctattctaatatgtactcaacatcaagttataaacatgtaataaacatggaaataaagtttagct

SEQ ID NO: 335 - DNA, 4516 bp, Homo sapiens
gctgccgcgccccgccctttctcggcccccggagggtgacggggtgaaggcgggggaaccgaggtggggagtccgccagagctcccagactgcgagcacgcgagccgccgcagccgtcacccgcgccgcgtcacggctcccgggcccgccctcctctgacccctcccctctctccgtttccccctctccccctcctccgccgaccgagcagtgacttaagcaacggagcgcggtgaagctcatttttctccttcctcgcagccgcgccagggagctcgcggcgcgcggcccctgtcctccggcccgagatgaatcctgcggcagaagccgagttcaacatcctcctggccaccgactcctacaaggttactcactataaacaatatccacccaacacaagcaaagtttattcctactttgaatgccgtgaaaagaagacagaaaactccaaattaaggaaggtgaaatatgaggaaacagtattttatgggttgcagtacattcttaataagtacttaaaaggtaaagtagtaaccaaagagaaaatccaggaagccaaagatgtctacaaagaacatttccaagatgatgtctttaatgaaaagggatggaactacattcttgagaagtatgatgggcatcttccaatagaaataaaagctgttcctgagggctttgtcattcccagaggaaatgttctcttcacggtggaaaacacagatccagagtgttactggcttacaaattggattgagactattcttgttcagtcctggtatccaatcacagtggccacaaattctagagagcagaagaaaatattggccaaatatttgttagaaacttctggtaacttagatggtctggaatacaagttacatgattttggctacagaggagtctcttcccaagagactgctggcataggagcatctgctcacttggttaacttcaaaggaacagatacagtagcaggacttgctctaattaaaaaatattatggaacgaaagatcctgttccaggctattctgttccagcagcagaacacagtaccataacagcttgggggaaagaccatgaaaaagatgcttttgaacatattgtaacacagttttcatcagtgcctgtatctgtggtcagcgatagctatgacatttataatgcgtgtgagaaaatatggggtgaagatctaagacatttaatagtatcgagaagtacacaggcaccactaataatcagacctgattctggaaaccctcttgacactgtgttaaaggttttggagattttaggtaagaagtttcctgttactgagaactcaaagggttacaagttgctgccaccttatcttagagttattcaaggggatggagtagatattaataccttacaagagattgtagaaggcatgaaacaaaaaatgtggagtattgaaaatattgccttcggttctggtggaggtttgctacagaagttgacaagagatctcttgaattgttccttcaagtgtagctatgttgtaactaatggccttgggattaacgtcttcaaggacccagttgctgatcccaacaaaaggtccaaaaagggccgattatctttacataggacgccagcagggaattttgttacactggaggaaggaaaaggagaccttgaggaatatggtcaggatcttctccatactgtcttcaagaatggcaaggtgacaaaaagctattcatttgatgaaataagaaaaaatgcacagctgaatattgaactggaagcagcacatcattaggctttatgactgggtgtgtgttgtgtgtatgtaatacataatgtttattgtacagatgtgtggggtttgtgttttatgatacattacagccaaattatttgttggtttatggacatactgccctttcattttttttcttttccagtgtttaggtgatctcaaattaggaaatgcatttaaccatgtaaaagatgagtgctaaagtaagctttttagggccctttgccaataggtagtcattcaatctggtattgatcttttcacaaataacagaactgagaaacttttatatataactgatgatcacataaaacagatttgcataaaattaccatgattgctttatgtttatatttaacttgtatttttgtacaaacaagattgtgtaagatatatttgaagtttcagtgatttaacagtctttccaacttttcatgatttttatgagcacagactttcaagaaaatacttgaaaataaattacattgccttttgtccattaatcagcaaataaaacatggccttaacaaagttgtttgtgttattgtacaatttgaaaattatgtcgggacataccctatagaattactaaccttactgccccttgtagaatatgtattaatcattctacattaaagaaaataatggttcttactggaatgtctaggcactgtacagttattatatatcttggttgttgtattgtaccagtgaaatgccaaatttgaaaggcctgtactgcaattttatatgtcagagattgcctgtggctctaatatgcacctcaagattttaaggagataatgtttttagagagaatttctgcttccactatagaatatatacataaatgtaaaatacttacaaaagtggaagtagtgtattttaaagtaattacacttctgaatttatttttcatattctatagttggtatgacttaaatgaattactggagtgggtagtgagtgtacttaaatgtttcaattctgttatattttttattaagtttttaaaaaattaaattggatattaaattgtatggacatcatttattaattttaaactgaatgccctcaataagtaatactgaagcacattcttaaatgaagataaattatctccaatgaaaagcatgacatgtgtttcaatagaagaatcttaagttggctaaattcaaagtgcttgacatcaaaatgttctagagtgattagctactagattctgaatcatacatcacatctgactagagaccagtttctttcgaatgattcttttatgtatgtagatctgttcttctgaggcagcggttggccaactatagcccaaaggccaaatttggacttctttttataaatgcagattgtctatggctgctttcccactactccagcctaaggtaaacagctgcaatagaagccaaatgagaatcgcaaagcccaaaatgtttattaacctgccctttacacaaaattacacaaaaagtttcctgatctctgttctaagaaaaggagtgtgccttgcatttaaaaggaaatgttggtttctagggaagggaggaggctaaataattgatacggaattttcctcttttgtcttcttttttctcacttaagaatccgatactggaagactgatttagaaaagtttttaacatgacattaaatgtgaaattttaaaaattgaaaagccataaatcatctgttttaaatagttacatgagaaaatgatcactagaataacctaattagaagtgttatcttcattaaatgttttttgtaagtggtattagaaagaatatgtttttcagatggttctttaaacatgtagtgagaacaataagcattattcacttttagtaagtcttctgtaatccatgatataaaataattttaaaatgattttttaatgtatttgagtaaagatgagtagtattaagaaaaacacacatttcttcacaaaatgtgctaaggggcgtgtaaagaatcaaaagaaactattaccaataatagttttgataatcacccataattttgtgtttaaacattgaaattatagtacagacagtattctctgtgttctgtgaatttcagcagcttcagaatagagtttaatttagaaatttgcagtgaaaaaagctatctctttgttcacaaccataaatcaggagatggagattaattctattggctcttagtcacttggaactgattaattctgactttctgtcactaagcacttggtatttggccatctccattctgagcaccaaacggttaacacgaatgtccactagaactctgctgtgtgtcacccttaaatcagtctaaatcttccagacaaaagcaaatggcatttatggatttaagtcattagagtatttatatcttaaataggaggtaggatttctgtgttaagactcttatttgtaccctataattaaagtaaaatgttttttatgagtatcccttgttttcccttcttaaattgttatcaaacaatttttataatgaaatctatcttggaaaattagaaagaaaaatggcaaggtatttattgttctgtttgccataatttagaactcacacttaagtattttgtagttttacattcctttttaacccattcagtggagaatgtcagcttttctcccaagttgtatgttaagtctattctaatatgtactcaacatcaagttataaacatgtaataaacatggaaataaagtttagct

SEQ ID NO: 336 - DNA, 4576 bp, Homo sapiens
gctgccgcgccccgccctttctcggcccccggagggtgacggggtgaaggcgggggaaccgaggtggggagtccgccagagctcccagactgcgagcacgcgagccgccgcagccgtcacccgcgccgcgtcacggctcccgggcccgccctcctctgacccctcccctctctccgtttccccctctccccctcctccgccgaccgagcagtgacttaagcaacggagcgcggtgaagctcatttttctccttcctcgcagccgcgccagggagctcgcggcgcgcggcccctgtcctccggcccgagatgaatcctgcggcagaagccgagttcaacatcctcctggccaccgactcctacaaggttactcactataaacaatatccacccaacacaagcaaagtttattcctactttgaatgccgtgaaaagaagacagaaaactccaaattaaggaaggtgaaatatgaggaaacagtattttatgggttgcagtacattcttaataagtacttaaaaggtaaagtagtaaccaaagagaaaatccaggaagccaaagatgtctacaaagaacatttccaagatgatgtctttaatgaaaagggatggaactacattcttgagaagtatgatgggcatcttccaatagaaataaaagctgttcctgagggctttgtcattcccagaggaaatgttctcttcacggtggaaaacacagatccagagtgttactggcttacaaattggattgagactattcttgttcagtcctggtatccaatcacagtggccacaaattctagagagcagaagaaaatattggccaaatatttgttagaaacttctggtaacttagatggtctggaatacaagttacatgattttggctacagaggagtctcttcccaagagactgctggcataggagcatctgctcacttggttaacttcaaaggaacagatacagtagcaggacttgctctaattaaaaaatattatggaacgaaagatcctgttccaggctattctgttccagcagcagaacacagtaccataacagcttgggggaaagaccatgaaaaagatgcttttgaacatattgtaacacagttttcatcagtgcctgtatctgtggtcagcgatagctatgacatttataatgcgtgtgagaaaatatggggtgaagatctaagacatttaatagtatcgagaagtacacaggcaccactaataatcagacctgattctggaaaccctcttgacactgtgttaaaggttttggagattttaggtaagaagtttcctgttactgagaactcaaagggttacaagttgctgccaccttatcttagagttattcaaggggatggagtagatattaataccttacaagagattgtagaaggcatgaaacaaaaaatgtggagtattgaaaatattgccttcggttctggtggaggtttgctacagaagttgacaagagatctcttgaattgttccttcaagtgtagctatgttgtaactaatggccttgggattaacgtcttcaaggacccagttgctgatcccaacaaaaggtccaaaaagggccgattatctttacataggacgccagcagggaattttgttacactggaggaaggaaaaggagaccttgaggaatatggtcaggatcttctccatactgtcttcaagaatggcaaggtgacaaaaagctattcatttgatgaaataagaaaaaatgcacagctgaatattgaactggaagcagcacatcattaggctttatgactgggtgtgtgttgtgtgtatgtaatacataatgtttattgtacagatgtgtggggtttgtgttttatgatacattacagccaaattatttgttggtttatggacatactgccctttcattttttttcttttccagtgtttaggtgatctcaaattaggaaatgcatttaaccatgtaaaagatgagtgctaaagtaagctttttagggccctttgccaataggtagtcattcaatctggtattgatcttttcacaaataacagaactgagaaacttttatatataactgatgatcacataaaacagatttgcataaaattaccatgattgctttatgtttatatttaacttgtatttttgtacaaacaagattgtgtaagatatatttgaagtttcagtgatttaacagtctttccaacttttcatgatttttatgagcacagactttcaagaaaatacttgaaaataaattacattgccttttgtccattaatcagcaaataaaacatggccttaacaaagttgtttgtgttattgtacaatttgaaaattatgtcgggacataccctatagaattactaaccttactgccccttgtagaatatgtattaatcattctacattaaagaaaataatggttcttactggaatgtctaggcactgtacagttattatatatcttggttgttgtattgtaccagtgaaatgccaaatttgaaaggcctgtactgcaattttatatgtcagagattgcctgtggctctaatatgcacctcaagattttaaggagataatgtttttagagagaatttctgcttccactatagaatatatacataaatgtaaaatacttacaaaagtggaagtagtgtattttaaagtaattacacttctgaatttatttttcatattctatagttggtatgacttaaatgaattactggagtgggtagtgagtgtacttaaatgtttcaattctgttatattttttattaagtttttaaaaaattaaattggatattaaattgtatggacatcatttattaattttaaactgaatgccctcaataagtaatactgaagcacattcttaaatgaagataaattatctccaatgaaaagcatgacatgtgtttcaatagaagaatcttaagttggctaaattcaaagtgcttgacatcaaaatgttctagagtgattagctactagattctgaatcatacatcacatctgactagagaccagtttctttcgaatgattcttttatgtatgtagatctgttcttctgaggcagcggttggccaactatagcccaaaggccaaatttggacttctttttataaatgcagattgtctatggctgctttcccactactccagcctaaggtaaacagctgcaatagaagccaaatgagaatcgcaaagcccaaaatgtttattaacctgccctttacacaaaattacacaaaaagtttcctgatctctgttctaagaaaaggagtgtgccttgcatttaaaaggaaatgttggtttctagggaagggaggaggctaaataattgatacggaattttcctcttttgtcttcttttttctcacttaagaatccgatactggaagactgatttagaaaagtttttaacatgacattaaatgtgaaattttaaaaattgaaaagccataaatcatctgttttaaatagttacatgagaaaatgatcactagaataacctaattagaagtgttatcttcattaaatgttttttgtaagtggtattagaaagaatatgtttttcagatggttctttaaacatgtagtgagaacaataagcattattcacttttagtaagtcttctgtaatccatgatataaaataattttaaaatgattttttaatgtatttgagtaaagatgagtagtattaagaaaaacacacatttcttcacaaaatgtgctaaggggcgtgtaaagaatcaaaagaaactattaccaataatagttttgataatcacccataattttgtgtttaaacattgaaattatagtacagacagtattctctgtgttctgtgaatttcagcagcttcagaatagagtttaatttagaaatttgcagtgaaaaaagctatctctttgttcacaaccataaatcaggagatggagattaattctattggctcttagtcacttggaactgattaattctgactttctgtcactaagcacttggtatttggccatctccattctgagcaccaaacggttaacacgaatgtccactagaactctgctgtgtgtcacccttaaatcagtctaaatcttccagacaaaagcaaatggcatttatggatttaagtcattagattttcaactgacattaattaatccctcttgattgattatatcatcaagtatttatatcttaaataggaggtaggatttctgtgttaagactcttatttgtaccctataattaaagtaaaatgttttttatgagtatcccttgttttcccttcttaaattgttatcaaacaatttttataatgaaatctatcttggaaaattagaaagaaaaatggcaaggtatttattgttctgtttgccataatttagaactcacacttaagtattttgtagttttacattcctttttaacccattcagtggagaatgtcagcttttctcccaagttgtatgttaagtctattctaatatgtactcaacatcaagttataaacatgtaataaacatggaaataaagtttagctctattagtgaagt

SEQ ID NO: 337 - DNA, 2972 bp, Homo sapiens
cgaggggccaaccccggcctaggctctccaccgcatcggattctggaatttacgatcacgaaagttctattgtcccgcgattggctcccgggccgcatgacatcatagcgcttgattcatccttcgggtcccgattggctggccgcgccattgtgacgtcacggtcagcccacgttctgattgtagatagccggcgccttcctcttcccatcgcgcgggtcctagccaccggtgtctccttctacatccgcctctgcgccggctgccacccgcgctccctccgccgccgccgccttgctgctgctcaaagctgctgccgccccttgggctaaaaggttttcaaatggaacattttgatgcatcacttagtacctatttcaaggcattgctaggccctcgagatactagagtaaaaggatggtttcttctggacaattatatacccacatttatctgctctgtcatatatttactaattgtatggctgggaccaaaatacatgaggaataaacagccattctcttgccgggggattttagtggtgtataaccttggactcacactgctgtctctgtatatgttctgtgagttagtaacaggagtatgggaaggcaaatacaacttcttctgtcagggcacacgcaccgcaggagaatcagatatgaagattatccgtgtcctctggtggtactacttctccaaactcatagaatttatggacactttcttcttcatcctgcgcaagaacaaccaccagatcacggtcctgcacgtctaccaccatgcctcgatgctgaacatctggtggtttgtgatgaactgggtcccctgcggccactcttattttggtgccacacttaatagcttcatccacgtcctcatgtactcttactatggtttgtcgtcagtcccttccatgcgtccatacctctggtggaagaagtacatcactcaggggcagctgcttcagtttgtgctgacaatcatccagaccagctgcggggtcatctggccgtgcacattccctcttggttggttgtatttccagattggatacatgatttccctgattgctctcttcacaaacttctacattcagacctacaacaagaaaggggcctcccgaaggaaagaccacctgaaggaccaccagaatgggtccatggctgctgtgaatggacacaccaacagcttttcacccctggaaaacaatgtgaagccaaggaagctgcggaaggattgaagtcaaagaattgaaaccctccaaaccacgtcatctgattgtaagcacaatatgagttgtgccccaatgctcgttaacagctgctgtaactagtctggcctacaatagtgtgattcatgtaggacttctttcatcaattcaaaacccctagaaaacgtatacagattatataagtagggataagatttctaacatttctgggctctctgacccctgcgctagactgtggaaagggagtattattatagtatacaacactgctgttgccttattagttataacatgataggtgctgaattgtgattcacaatttaaaaacactgtaatccaaacttttttttttaactgtagatcatgcatgtgattgtaaatgtaaatttgtacaatgttgttatggtagagaaacacacatgccttaaaatttaaaaagcagggcccaaagcttattagtttaaattagggtatgtttcaagtttgtattaatttgtaatagctctgtttagaaaaaatcaaagaccatgatttatgaaactaatgtgacataatttccagtgacttgttgatgtgaaatcagacacggcaccttcagttttgtactattggctttgaatcaagcaggctcaaatctagtggaacagtcagtttaactttttaacagatcttatttttttattttgagtgccactattaatgtaaaaaggggggggctctacagcagtcgtgatgaaacttaaatatatattctttgtcctcgagattttaggaagggtgtagggtgagtaggccatttttaatttctgaagtgctaagtgtttttatacagcaaacaaaaagtcaattttgctttccaccagtgcgagagaggatgtatacttttcaagagagatgattgcctatttaccgtttgacagagtcccgtagatgagcaatggggaactggttgccagggtctaaatttggattgatttatgcactgttatctgttttgacacagatttccttgtaaaatgtgcctagtttaccaaaattaacaaagggggggaaaggaccttagaactttttaaggtaaaatcaaatatagctacagcataagagaatcgagaaatttgatagaggtaacttgtttaatgtaaatctaatagtacttgtaatttctttctgcttagaatctaaagatgtgtttagaacctcttgtttaaaaataatagactgcttatcataaaatcacatctcacacatttgaggcagtggtcaaacaggtaaagcctatgatgtgtgtcattttaaagtgtcggaatttagcctctgaataccttctccattgggggaaagatattcttggaaccactcatgacatatcttagaaggtcattgacaatgtataaactaattgttggtttgatatttatgtaaatatcagtttaccatgctttaattttgcacattcgtactatagggagcctattggttctctattagtcttgtgggttttctgtttgaaaaggagtcatggcatctgtttacatttaccttatcaaacctagaatgtgtatatttataaatgtatgtcttcattgctaggtactaatttgcagatgtctttacatatttcaatacagaaactataacattcaatagtgtgctgtcaaagtgtgcttagctcacctggatatacctacattgttaaatgtctaaacagtaatcattaaaacatttttgattacctgtg

SEQ ID NO: 338 - DNA, 2714 bp, Homo sapiens
ctctgcgccgggggagctagagtgtgtgttgtcttgcgagttgtaaggaaaagtgcctttttactgtttccacgccggttttcaaatggaacattttgatgcatcacttagtacctatttcaaggcattgctaggccctcgagatactagagtaaaaggatggtttcttctggacaattatatacccacatttatctgctctgtcatatatttactaattgtatggctgggaccaaaatacatgaggaataaacagccattctcttgccgggggattttagtggtgtataaccttggactcacactgctgtctctgtatatgttctgtgagttagtaacaggagtatgggaaggcaaatacaacttcttctgtcagggcacacgcaccgcaggagaatcagatatgaagattatccgtgtcctctggtggtactacttctccaaactcatagaatttatggacactttcttcttcatcctgcgcaagaacaaccaccagatcacggtcctgcacgtctaccaccatgcctcgatgctgaacatctggtggtttgtgatgaactgggtcccctgcggccactcttattttggtgccacacttaatagcttcatccacgtcctcatgtactcttactatggtttgtcgtcagtcccttccatgcgtccatacctctggtggaagaagtacatcactcaggggcagctgcttcagtttgtgctgacaatcatccagaccagctgcggggtcatctggccgtgcacattccctcttggttggttgtatttccagattggatacatgatttccctgattgctctcttcacaaacttctacattcagacctacaacaagaaaggggcctcccgaaggaaagaccacctgaaggaccaccagaatgggtccatggctgctgtgaatggacacaccaacagcttttcacccctggaaaacaatgtgaagccaaggaagctgcggaaggattgaagtcaaagaattgaaaccctccaaaccacgtcatctgattgtaagcacaatatgagttgtgccccaatgctcgttaacagctgctgtaactagtctggcctacaatagtgtgattcatgtaggacttctttcatcaattcaaaacccctagaaaacgtatacagattatataagtagggataagatttctaacatttctgggctctctgacccctgcgctagactgtggaaagggagtattattatagtatacaacactgctgttgccttattagttataacatgataggtgctgaattgtgattcacaatttaaaaacactgtaatccaaacttttttttttaactgtagatcatgcatgtgattgtaaatgtaaatttgtacaatgttgttatggtagagaaacacacatgccttaaaatttaaaaagcagggcccaaagcttattagtttaaattagggtatgtttcaagtttgtattaatttgtaatagctctgtttagaaaaaatcaaagaccatgatttatgaaactaatgtgacataatttccagtgacttgttgatgtgaaatcagacacggcaccttcagttttgtactattggctttgaatcaagcaggctcaaatctagtggaacagtcagtttaactttttaacagatcttatttttttattttgagtgccactattaatgtaaaaaggggggggctctacagcagtcgtgatgaaacttaaatatatattctttgtcctcgagattttaggaagggtgtagggtgagtaggccatttttaatttctgaagtgctaagtgtttttatacagcaaacaaaaagtcaattttgctttccaccagtgcgagagaggatgtatacttttcaagagagatgattgcctatttaccgtttgacagagtcccgtagatgagcaatggggaactggttgccagggtctaaatttggattgatttatgcactgttatctgttttgacacagatttccttgtaaaatgtgcctagtttaccaaaattaacaaagggggggaaaggaccttagaactttttaaggtaaaatcaaatatagctacagcataagagaatcgagaaatttgatagaggtaacttgtttaatgtaaatctaatagtacttgtaatttctttctgcttagaatctaaagatgtgtttagaacctcttgtttaaaaataatagactgcttatcataaaatcacatctcacacatttgaggcagtggtcaaacaggtaaagcctatgatgtgtgtcattttaaagtgtcggaatttagcctctgaataccttctccattgggggaaagatattcttggaaccactcatgacatatcttagaaggtcattgacaatgtataaactaattgttggtttgatatttatgtaaatatcagtttaccatgctttaattttgcacattcgtactatagggagcctattggttctctattagtcttgtgggttttctgtttgaaaaggagtcatggcatctgtttacatttaccttatcaaacctagaatgtgtatatttataaatgtatgtcttcattgctaggtactaatttgcagatgtctttacatatttcaatacagaaactataacattcaatagtgtgctgtcaaagtgtgcttagctcacctggatatacctacattgttaaatgtctaaacagtaatcattaaaacatttttgattacctgtg

SEQ ID NO: 339 - DNA, 2835 bp, Homo sapiens
cgaggggccaaccccggcctaggctctccaccgcatcggattctggaatttacgatcacgaaagttctattgtcccgcgattggctcccgggccgcatgacatcatagcgcttgattcatccttcgggtcccgattggctggccgcgccattgtgacgtcacggtcagcccacgttctgattgtagatagccggcgccttcctcttcccatcgcgcgggtcctagccaccggtgtctccttctacatccgcctctgcgccggctgccacccgcgctccctccgccgccgccgccttgctgctgctcaaagctgctgccgccccttgggctaaaaggttttcaaatggaacattttgatgcatcacttagtacctatttcaaggcattgctaggccctcgagatactagagtaaaaggatggtttcttctggacaattatatacccacatttatctgctctgtcatatatttactaattgtatggctgggaccaaaatacatgaggaataaacagccattctcttgccgggggattttagtggtgtataaccttggactcacactgctgtctctgtatatgttctgtgagttagtaacaggagtatgggaaggcaaatacaacttcttctgtcagggcacacgcaccgcaggagaatcagatatgaagattatccgtgtcctctggtggtactacttctccaaactcatagaatttatggacactttcttcttcatcctgcgcaagaacaaccaccagatcacggtcctgcacgtctaccaccatgcctcgatgctgaacatctggtggtttgtgatgaactgggtcccctgcggccactcttattttggtgccacacttaatagcttcatccacgtcctcatgtactcttactatggtttgtcgtcagtcccttccatgcgtccatacctctggtggaagaagtacatcactcaggggcagctgcttcagtttgtgctgacaatcatccagaccagctgcggggtcatctggccgtgcacattccctcttggttggttgtatttccagattggatacatgatttccctgattgctctcttcacaaacttctacattcagacctacaacaagaaaggggcctcccgaaggaaagaccacctgaaggaccaccagaatgggtccatggctgctgtgaatggacacaccaacagcttttcacccctggaaaacaatgtgaagccaaggaagctgcggaaggattgaagtcaaagaattgaaaccctccaaaccacgtcatctgattgtaagcacaatatgagttgtgccccaatgctcgttaacagctgctgtaactagtctggcctacaatagtgtgattcatgtaggacttctttcatcaattcaaaacccctagaaaacgtatacagattatataagtagggataagatttctaacatttctgggctctctgacccctgcgctagactgtggaaagggagtattattatagtatacaacactgctgttgccttattagttataacatgataggtgctgaattgtgattcacaatttaaaaacactgtaatccaaacttttttttttaactgtagatcatgcatgtgattgtaaatgtaaatttgtacaatgttgttatggtagagaaacacacatgccttaaaatttaaaaagcagggcccaaagcttattagtttaaattagggtatgtttcaagtttgtattaatttgtaatagctctgtttagaatgtgaaatcagacacggcaccttcagttttgtactattggctttgaatcaagcaggctcaaatctagtggaacagtcagtttaactttttaacagatcttatttttttattttgagtgccactattaatgtaaaaaggggggggctctacagcagtcgtgatgaaacttaaatatatattctttgtcctcgagattttaggaagggtgtagggtgagtaggccatttttaatttctgaagtgctaagtgtttttatacagcaaacaaaaagtcaattttgctttccaccagtgcgagagaggatgtatacttttcaagagatggattgatttatgcactgttatctgttttgacacagatttccttgtaaaatgtgcctagtttaccaaaattaacaaagggggggaaaggaccttagaactttttaaggtaaaatcaaatatagctacagcataagagaatcgagaaatttgatagaggtaacttgtttaatgtaaatctaatagtacttgtaatttctttctgcttagaatctaaagatgtgtttagaacctcttgtttaaaaataatagactgcttatcataaaatcacatctcacacatttgaggcagtggtcaaacaggtaaagcctatgatgtgtgtcattttaaagtgtcggaatttagcctctgaataccttctccattgggggaaagatattcttggaaccactcatgacatatcttagaaggtcattgacaatgtataaactaattgttggtttgatatttatgtaaatatcagtttaccatgctttaattttgcacattcgtactatagggagcctattggttctctattagtcttgtgggttttctgtttgaaaaggagtcatggcatctgtttacatttaccttatcaaacctagaatgtgtatatttataaatgtatgtcttcattgctaggtactaatttgcagatgtctttacatatttcaatacagaaactataacattcaatagtgtgctgtcaaagtgtgcttagctcacctggatatacctacattgttaaatgtctaaacagtaatcattaaaacatttttgatta

SEQ ID NO: 340 - DNA, 2847 bp, Homo sapiens
cgaggggccaaccccggcctaggctctccaccgcatcggattctggaatttacgatcacgaaagttctattgtcccgcgattggctcccgggccgcatgacatcatagcgcttgattcatccttcgggtcccgattggctggccgcgccattgtgacgtcacggtcagcccacgttctgattgtagatagccggcgccttcctcttcccatcgcgcgggtcctagccaccggtgtctccttctacatccgcctctgcgccggctgccacccgcgctccctccgccgccgccgccttgctgctgctcaaagctgctgccgccccttgggctaaaaggttttcaaatggaacattttgatgcatcacttagtacctatttcaaggcattgctaggccctcgagatactagagtaaaaggatggtttcttctggacaattatatacccacatttatctgctctgtcatatatttactaattgtatggctgggaccaaaatacatgaggaataaacagccattctcttgccgggggattttagtggtgtataaccttggactcacactgctgtctctgtatatgttctgtgagttagtaacaggagtatgggaaggcaaatacaacttcttctgtcagggcacacgcaccgcaggagaatcagatatgaagattatccgtgtcctctggtggtactacttctccaaactcatagaatttatggacactttcttcttcatcctgcgcaagaacaaccaccagatcacggtcctgcacgtctaccaccatgcctcgatgctgaacatctggtggtttgtgatgaactgggtcccctgcggccactcttcagtttgtgctgacaatcatccagaccagctgcggggtcatctggccgtgcacattccctcttggttggttgtatttccagattggatacatgatttccctgattgctctcttcacaaacttctacattcagacctacaacaagaaaggggcctcccgaaggaaagaccacctgaaggaccaccagaatgggtccatggctgctgtgaatggacacaccaacagcttttcacccctggaaaacaatgtgaagccaaggaagctgcggaaggattgaagtcaaagaattgaaaccctccaaaccacgtcatctgattgtaagcacaatatgagttgtgccccaatgctcgttaacagctgctgtaactagtctggcctacaatagtgtgattcatgtaggacttctttcatcaattcaaaacccctagaaaacgtatacagattatataagtagggataagatttctaacatttctgggctctctgacccctgcgctagactgtggaaagggagtattattatagtatacaacactgctgttgccttattagttataacatgataggtgctgaattgtgattcacaatttaaaaacactgtaatccaaacttttttttttaactgtagatcatgcatgtgattgtaaatgtaaatttgtacaatgttgttatggtagagaaacacacatgccttaaaatttaaaaagcagggcccaaagcttattagtttaaattagggtatgtttcaagtttgtattaatttgtaatagctctgtttagaaaaaatcaaagaccatgatttatgaaactaatgtgacataatttccagtgacttgttgatgtgaaatcagacacggcaccttcagttttgtactattggctttgaatcaagcaggctcaaatctagtggaacagtcagtttaactttttaacagatcttatttttttattttgagtgccactattaatgtaaaaaggggggggctctacagcagtcgtgatgaaacttaaatatatattctttgtcctcgagattttaggaagggtgtagggtgagtaggccatttttaatttctgaagtgctaagtgtttttatacagcaaacaaaaagtcaattttgctttccaccagtgcgagagaggatgtatacttttcaagagagatgattgcctatttaccgtttgacagagtcccgtagatgagcaatggggaactggttgccagggtctaaatttggattgatttatgcactgttatctgttttgacacagatttccttgtaaaatgtgcctagtttaccaaaattaacaaagggggggaaaggaccttagaactttttaaggtaaaatcaaatatagctacagcataagagaatcgagaaatttgatagaggtaacttgtttaatgtaaatctaatagtacttgtaatttctttctgcttagaatctaaagatgtgtttagaacctcttgtttaaaaataatagactgcttatcataaaatcacatctcacacatttgaggcagtggtcaaacaggtaaagcctatgatgtgtgtcattttaaagtgtcggaatttagcctctgaataccttctccattgggggaaagatattcttggaaccactcatgacatatcttagaaggtcattgacaatgtataaactaattgttggtttgatatttatgtaaatatcagtttaccatgctttaattttgcacattcgtactatagggagcctattggttctctattagtcttgtgggttttctgtttgaaaaggagtcatggcatctgtttacatttaccttatcaaacctagaatgtgtatatttataaatgtatgtcttcattgctaggtactaatttgcagatgtctttacatatttcaatacagaaactataacattcaatagtgtgctgtcaaagtgtgcttagctcacctggatatacctacattgttaaatgtctaaacagtaatcattaaaacatttttgattacctgtg

SEQ ID NO: 341 - DNA, 903 bp, Homo sapiens
tttcaaatggaacattttgatgcatcacttagtacctatttcaaggcattgctaggccctcgagatactagagtaaaaggatggtttcttctggacaattatatacccacatttatctgctctgtcatatatttactaattgtatggctgggaccaaaatacatgaggaataaacagccattctcttgccgggggattttagtggtgtataaccttggactcacactgctgtctctgtatatgttctgtgagttagtaacaggagtatgggaaggcaaatacaacttcttctgtcagggcacacgcaccgcaggagaatcagatatgaagattatccgtgtcctctggtggtactacttctccaaactcatagaatttatggacactttcttcttcatcctgcgcaagaacaaccaccagatcacggtcctgcacgtctaccaccatgcctcgatgctgaacatctggtggtttgtgatgaactgggtcccctgcggccactcttattttggtgccacacttaatagcttcatccacgtcctcatgtactcttactatggtttgtcgtcagtcccttccatgcgtccatacctctggtggaagaagtacatcactcaggggcagctgcttcagtttgtgctgacaatcatccagaccagctgcggggtcatctggccgtgcacattccctcttggttggttgtatttccagattggatacatgatttccctgattgctctcttcacaaacttctacattcagacctacaacaagaaaggggcctcccgaaggaaagaccacctgaaggaccaccagaatgggtccatggctgctgtgaatggacacaccaacagcttttcacccctggaaaacaatgtgaagccaaggaagctgcggaaggat

SEQ ID NO: 342 - DNA, 2279 bp, Homo sapiens
ttggacctagcttggcgcggaatccgtgaattgcccgcggcccgagggtgcaggcctcctctagcccgtggaatccaaccccggctcctgtcagcagccctcccctgctgctccccatccctgccatcgtcttcatcgctgtgggcatctatttgttgctgctgggtctagtcctgctgactaggaactgcctgctggcccagggctgctgcgcggacggtagctccccctgcaggaagcaaggttcctccgggcccccagactgctgctggacctgtgcagaagcctgcaactttcctctgcctagcccggcccacttcctggatgcttgctgcccccagcccaccagagctgactgggcacctcgctgcccccgctgctgcccactctgcgactgtgcctgtacgtgccagctccccgactgccagagcctcaactgtctctgcttcgagatcaagctccgatgaggacccagggcccctgccctctggggagcggccagcccccagggcccatgtgccctcctccctgaagagcctttccccacgccactggaaccacagatggcctgccgagcacccaggcctgggaactggaagtggcagcgcagggcctggctccctgcagggcaggactcttggccggctggacggcagctcctctggagggccagaaaagagaggggctagtgctcgggcaggtgccctggcttcccttcccctccacacgtcaacgattctatttgaagttgggcaggggggtggcgctgctcaccacacacaagtgttataggaggagtctggcccttgagtaccgggtacgcaggggtgcctcaaccacactccgtccacggactctccgttattttaggaggtccctggccaaagatttatttctcttgacaaccaagggcctccgtctggatttccaaggaagaatttcctctgaagcaccggaacttgctactaccagcaccatgccctaccaatatccagcactgaccccggagcagaagaaggagctgtctgacatcgctcaccgcatcgtggcacctggcaagggcatcctggctgcagatgagtccactgggagcattgccaagcggctgcagtccattggcaccgagaacaccgaggagaaccggcgcttctaccgccagctgctgctgacagctgacgaccgcgtgaacccctgcattgggggtgtcatcctcttccatgagacactctaccagaaggcggatgatgggcgtcccttcccccaagttatcaaatccaagggcggtgttgtgggcatcaaggtagacaagggcgtggtccccctggcagggacaaatggcgagactaccacccaagggttggatgggctgtctgagcgctgtgcccagtacaagaaggacggagctgacttcgccaagtggcgttgtgtgctgaagattggggaacacaccccctcagccctcgccatcatggaaaatgccaatgttctggcccgttatgccagtatctgccagcagaatggcattgtgcccatcgtggagcctgagatcctccctgatggggaccatgacttgaagcgctgccagtatgtgaccgagaaggtgctggctgctgtctacaaggctctgagtgaccaccacatctacctggaaggcaccttgctgaagcccaacatggtcaccccaggccatgcttgcactcagaagttttctcatgaggagattgccatggcgaccgtcacagcgctgcgccgcacagtgccccccgctgtcactgggatcaccttcctgtctggaggccagagtgaggaggaggcgtccatcaacctcaatgccattaacaagtgccccctgctgaagccctgggccctgaccttctcctacggccgagccctgcaggcctctgccctgaaggcctggggcgggaagaaggagaacctgaaggctgcgcaggaggagtatgtcaagcgagccctggccaacagccttgcctgtcaaggaaagtacactccgagcggtcaggctggggctgctgccagcgagtccctcttcgtctctaaccacgcctattaagcggaggtgttcccaggctgcccccaacactccaggccctgccccctcccactcttgaagaggaggccgcctcctcggggctccaggctggcttgcccgcgctctttcttccctcgtgacagtggtgtgtggtgtcgtctgtgaatgctaagtccatcaccctttccggcacactgccaaataaacagctatttaagggggagtcggc

SEQ ID NO: 343 - DNA, 1926 bp, Homo sapiens
gactgggcacctcgctgcccccgctgctgcccactctgcgactgtgcctgtacgtgccagctccccgactgccagagcctcaactgtctctgcttcgagatcaagctccgatgaggacccagggcccctgccctctggggagcggccagcccccagggcccatgtgccctcctccctgaagagcctttccccacgccactggaaccacagatggcctgccgagcacccaggcctgggaactggaagtggcagcgcagggcctggctccctgcagggcaggactcttggccggctggacggcagctcctctggagggccagaaaagagaggggctagtgctcgggcaggtgccctggcttcccttcccctccacacgtcaacgattctatttgaagttgggcaggggggtggcgctgctcaccacacacaagtgttataggaggagtctggcccttgagtaccgggtacgcaggggtgcctcaaccacactccgtccacggactctccgttattttaggaggtccctggccaaagatttatttctcttgacaaccaagggcctccgtctggatttccaaggaagaatttcctctgaagcaccggaacttgctactaccagcaccatgccctaccaatatccagcactgaccccggagcagaagaaggagctgtctgacatcgctcaccgcatcgtggcacctggcaagggcatcctggctgcagatgagtccactgggagcattgccaagcggctgcagtccattggcaccgagaacaccgaggagaaccggcgcttctaccgccagctgctgctgacagctgacgaccgcgtgaacccctgcattgggggtgtcatcctcttccatgagacactctaccagaaggcggatgatgggcgtcccttcccccaagttatcaaatccaagggcggtgttgtgggcatcaaggtagacaagggcgtggtccccctggcagggacaaatggcgagactaccacccaagggttggatgggctgtctgagcgctgtgcccagtacaagaaggacggagctgacttcgccaagtggcgttgtgtgctgaagattggggaacacaccccctcagccctcgccatcatggaaaatgccaatgttctggcccgttatgccagtatctgccagcagaatggcattgtgcccatcgtggagcctgagatcctccctgatggggaccatgacttgaagcgctgccagtatgtgaccgagaaggtgctggctgctgtctacaaggctctgagtgaccaccacatctacctggaaggcaccttgctgaagcccaacatggtcaccccaggccatgcttgcactcagaagttttctcatgaggagattgccatggcgaccgtcacagcgctgcgccgcacagtgccccccgctgtcactgggatcaccttcctgtctggaggccagagtgaggaggaggcgtccatcaacctcaatgccattaacaagtgccccctgctgaagccctgggccctgaccttctcctacggccgagccctgcaggcctctgccctgaaggcctggggcgggaagaaggagaacctgaaggctgcgcaggaggagtatgtcaagcgagccctggccaacagccttgcctgtcaaggaaagtacactccgagcggtcaggctggggctgctgccagcgagtccctcttcgtctctaaccacgcctattaagcggaggtgttcccaggctgcccccaacactccaggccctgccccctcccactcttgaagaggaggccgcctcctcggggctccaggctggcttgcccgcgctctttcttccctcgtgacagtggtgtgtggtgtcgtctgtgaatgctaagtccatcaccctttccggcacactgccaaataaacagctatttaagggggagtcggc

SEQ ID NO: 344 - DNA, 1556 bp, Homo sapiens
tccttcttaaaaaaaaccagggctccagagaatcagaacagccaccatcaccgcagggagtcaagggaggagggagattagagaaggagccagggagggtggcagggaggccacgtgatccgagtcccctcacccctttccttcccacaggtccctggccaaagatttatttctcttgacaaccaagggcctccgtctggatttccaaggaagaatttcctctgaagcaccggaacttgctactaccagcaccatgccctaccaatatccagcactgaccccggagcagaagaaggagctgtctgacatcgctcaccgcatcgtggcacctggcaagggcatcctggctgcagatgagtccactgggagcattgccaagcggctgcagtccattggcaccgagaacaccgaggagaaccggcgcttctaccgccagctgctgctgacagctgacgaccgcgtgaacccctgcattgggggtgtcatcctcttccatgagacactctaccagaaggcggatgatgggcgtcccttcccccaagttatcaaatccaagggcggtgttgtgggcatcaaggtagacaagggcgtggtccccctggcagggacaaatggcgagactaccacccaagggttggatgggctgtctgagcgctgtgcccagtacaagaaggacggagctgacttcgccaagtggcgttgtgtgctgaagattggggaacacaccccctcagccctcgccatcatggaaaatgccaatgttctggcccgttatgccagtatctgccagcagaatggcattgtgcccatcgtggagcctgagatcctccctgatggggaccatgacttgaagcgctgccagtatgtgaccgagaaggtgctggctgctgtctacaaggctctgagtgaccaccacatctacctggaaggcaccttgctgaagcccaacatggtcaccccaggccatgcttgcactcagaagttttctcatgaggagattgccatggcgaccgtcacagcgctgcgccgcacagtgccccccgctgtcactgggatcaccttcctgtctggaggccagagtgaggaggaggcgtccatcaacctcaatgccattaacaagtgccccctgctgaagccctgggccctgaccttctcctacggccgagccctgcaggcctctgccctgaaggcctggggcgggaagaaggagaacctgaaggctgcgcaggaggagtatgtcaagcgagccctggccaacagccttgcctgtcaaggaaagtacactccgagcggtcaggctggggctgctgccagcgagtccctcttcgtctctaaccacgcctattaagcggaggtgttcccaggctgcccccaacactccaggccctgccccctcccactcttgaagaggaggccgcctcctcggggctccaggctggcttgcccgcgctctttcttccctcgtgacagtggtgtgtggtgtcgtctgtgaatgctaagtccatcaccctttccggcacactgccaaataaacagctatttaagggggagtcggc

SEQ ID NO: 345 - DNA, 2207 bp, Homo sapiens
ttggacctagcttggcgcggaatccgtgaattgcccgcggcccgagggtgcaggcctcctctagcccgtggaatccaaccccggctcctgtcagcagccctcccctgctgctccccatccctgccatcgtcttcatcgctgtgggcatctatttgttgctgctgggtctagtcctgctgactaggaactgcctgctggcccagggctgctgcgcggacggtagctccccctgcaggaagcaaggttcctccgggcccccagactgctgctggacctgtgcagaagcctgcaactttcctctgcctagcccggcccacttcctggatgcttgctgcccccagcccaccagagctgactgggcacctcgctgcccccgctgctgcccactctgcgactgtgcctgtacgtgccagctccccgactgccagagcctcaactgtctctgcttcgagatcaagctccgatgaggacccagggcccctgccctctggggagcggccagcccccagggcccatgtgccctcctccctgaagagcctttccccacgccactggaaccacagatggcctgccgagcacccaggcctgggaactggaagtggcagcgcagggcctggctccctgcagggcaggactcttggccggctggacggcagctcctctggagggccagaaaagagaggggctagtgctcgggcaggtgccctggcttcccttcccctccacacgtcaacgattctatttgaagttgggcaggggggtggcgctgctcaccacacacaagtgttataggaggagtctggcccttgagtaccgggtacgcaggggtgcctcaaccacactccgtccacggactctccgttattttaggaggtccctggccaaagatttatttctcttgacaaccaagggcctccgtctggatttccaaggaagaatttcctctgaagcaccggtgagaacttgctactaccagcaccatgccctaccaatatccagcactgaccccggagcagaagaaggagctgtctgacatcgctcaccgcatcgtggcacctggcaagggcatcctggctgcagatgagtccactgggagcattgccaagcggctgcagtccattggcaccgagaacaccgaggagaaccggcgcttctaccgccagctgctgctgacagctgacgaccgcgtgaacccctgcattgggggtgtcatcctcttccatgagacactctaccagaaggcggatgatgggcgtcccttcccccaagttatcaaatccaagggcggtgttgtgggcatcaaggtagacaagggcgtggtccccctggcagggacaaatggcgagactaccacccaagggttggatgggctgtctgagcgctgtgcccagtacaagaaggacggagctgacttcgccaagtggcgttgtgtgctgaagattggggaacacaccccctcagccctcgccatcatggaaaatgccaatgttctggcccgttatgccagtatctgccagcagaatggcattgtgcccatcgtggagcctgagatcctccctgatggggaccatgacttgaagcgctgccagtatgtgaccgagaaggtgctggctgctgtctacaaggctctgagtgaccaccacatctacctggaaggcaccttgctgaagcccaacatggtcaccccaggccatgcttgcactcagaagttttctcatgaggagattgccatggcgaccgtcacagcgctgcgccgcacagtgccccccgctgtcactgggatcaccttcctgtctggaggccagagtgaggaggaggcgtccatcaacctcaatgccattaacaagtgccccctgctgaagccctgggccctgaccttctcctacggccgagccctgcaggcctctgccctgaaggcctggggcgggaagaaggagaacctgaaggctgcgcaggaggagtatgtcaagcgagccctggccaacagccttgcctgtcaaggaaagtacactccgagcggtcaggctggggctgctgccagcgagtccctcttcgtctctaaccacgcctattaagcggaggtgttcccaggctggcttgcccgcgctctttcttccctcgtgacagtggtgtgtggtgtcgtctgtgaatgctaagtccatcaccctttccggcacactgccaaataaacagctatttaaggggga

SEQ ID NO: 346 - DNA, 2219 bp, Homo sapiens
ttggacctagcttggcgcggaatccgtgaattgcccgcggcccgagggtgcaggcctcctctagcccgtggaatccaaccccggctcctgtcagcagccctcccctgctgctccccatccctgccatcgtcttcatcgctgtgggcatctatttgttgctgctgggtctagtcctgctgactaggaactgcctgctggcccagggctgctgcgcggacggtagctccccctgcaggaagcaaggttcctccgggcccccagactgctgctggacctgtgcagaagcctgcaactttcctctgcctagcccggcccacttcctggatgcttgctgcccccagcccaccagagctgactgggcacctcgctgcccccgctgctgcccactctgcgactgtgcctgtacgtgccagctccccgactgccagagcctcaactgtctctgcttcgagatcaagctccgatgaggacccagggcccctgccctctggggagcggccagcccccagggcccatgtgccctcctccctgaagagcctttccccacgccactggaaccacagatggcctgccgagcacccaggcctgggaactggaagtggcagcgcagggcctggctccctgcagggcaggactcttggccggctggacggcagctcctctggagggccagaaaagagaggggctagtgctcgggcaggtgccctggcttcccttcccctccacacgtcaacgattctatttgaagttgggcaggggggtggcgctgctcaccacacacaagtgttataggaggagtctggcccttgagtaccgggtacgcaggggtgcctcaaccacactccgtccacggactctccgttattttaggaggtccctggccaaagatttatttctcttgacaaccaagggcctccgtctggatttccaaggaagaatttcctctgaagcaccggtgagaacttgctactaccagcaccatgccctaccaatatccagcactgaccccggagcagaagaaggagctgtctgacatcgctcaccgcatcgtggcacctggcaagggcatcctggctgcagatgagtccactgggagcattgccaagcggctgcagtccattggcaccgagaacaccgaggagaaccggcgcttctaccgccagctgctgctgacagctgacgaccgcgtgaacccctgcattgggggtgtcatcctcttccatgagacactctaccagaaggcggatgatgggcgtcccttcccccaagttatcaaatccaagggcggtgttgtgggcatcaaggtagacaagggcgtggtccccctggcagggacaaatggcgagactaccacccaagggttggatgggctgtctgagcgctgtgcccagtacaagaaggacggagctgacttcgccaagtggcgttgtgtgctgaagattggggaacacaccccctcagccctcgccatcatggaaaatgccaatgttctggcccgttatgccagtatctgccagcaggtgggcctgcagaatggcattgtgcccatcgtggagcctgagatcctccctgatggggaccatgacttgaagcgctgccagtatgtgaccgagaaggtgctggctgctgtctacaaggctctgagtgaccaccacatctacctggaaggcaccttgctgaagcccaacatggtcaccccaggccatgcttgcactcagaagttttctcatgaggagattgccatggcgaccgtcacagcgctgcgccgcacagtgccccccgctgtcactgggatcaccttcctgtctggaggccagagtgaggaggaggcgtccatcaacctcaatgccattaacaagtgccccctgctgaagccctgggccctgaccttctcctacggccgagccctgcaggcctctgccctgaaggcctggggcgggaagaaggagaacctgaaggctgcgcaggaggagtatgtcaagcgagccctggccaacagccttgcctgtcaaggaaagtacactccgagcggtcaggctggggctgctgccagcgagtccctcttcgtctctaaccacgcctattaagcggaggtgttcccaggctggcttgcccgcgctctttcttccctcgtgacagtggtgtgtggtgtcgtctgtgaatgctaagtccatcaccctttccggcacactgccaaataaacagctatttaaggggga

SEQ ID NO: 347 - DNA, 903 bp, Homo sapiens
  misc_feature (889)..(889): n is a, c, g, or t
gccgaccccggccccacgggcggacactcggccgggcagccgcgggccgagcgcagcgcctccgccaccgatgcgcctggtggccagactccaagtgggaccggcggacacgcagcctcgcgtgtcaggggaagctgatggagaatcgagctctggatccagggactcgggactcctatggtgccaccagccacctccccaacaagggggccctggcgaaggtcaagaacaacttcaaagacttgatgtccaaactgacggagggccagtatgtgctgtgccggtggacagatggcctgtactacctcgggaagatcaagagggtcagcagctctaagcaaagctgcctcgtgactttcgaagataattccaaatactgggtcctatggaaggacatacagcatgccggtgttccaggagaggagcccaagtgcaacatctgcctagggaagacatcagggccgctgaatgagatcctcatctgcgggaagtgtggcctgggttaccaccagcagtgccacatccccatagcgggcagtgctgaccagcccctgctcacaccttggttctgccgacgctgcatcttcgcactggctgtgcgggtgagccttccatcctccccagtccctgcctctcctgcctcctccagtggggcagaccagagactcccatcacagagyctgagctccaagcagaagggccacacctgggctttggagacagatagcgcctctgccactgtccttggccaggatttgtagactccctgagcctcagtttcctcaactgtaaagtggagatgggtttggtgtcgggaataacgggaccaataaatgatgctttactattaaaaaagaaaatccatgtaaataaaaaaaaaaaaaaaaangggcggccgtttta

SEQ ID NO: 348 - DNA, 892 bp, Homo sapiens
cccgggccgaccccggccccacgggcggacactcggccgggcagccgcgggccgagcgcagccgcctccgccaccgatgcgcctggtggccagactccaagtgggaccggcggacacgcagcctcgcgtgtcaggggaagctgatggagaatcgagctctggatccagggactcgggactcctatggtgccaccagccacctccccaacaagggggccctggcgaaggtcaagaacaacttcaaagacttgatgtccaaactgacggagggccagtatgtgctgtgccggtggacagatggcctgtactacctcgggaagatcaagagggtcagcagctctaagcaaagctgcctcgtgactttcgaagataattccaaatactgggtcctatggaaggacatacagcatgccggtgttccaggagaggagcccaagtgcaacatctgcctagggaagacatcagggccgctgaatgagatcctcatctgcgggaagtgtggcctgggttaccaccagcagtgccacatccccatagcgggcagtgctgaccagcccctgctcacaccttggttctgccgacgctgcatcttcgcactggctgtgcgggtgagccttccatcctccccagtccctgcctctcctgcctcctccagtggggcagaccagagactcccatcacagagcctgagctccaagcagaagggccacacctgggctttggagacagatagcgcctctgccactgtccttggccaggatttgtagactccctgagcctcagtttcctcaactgtaaagtggagatgggtttggtgtcgggaataacgggaccaataaatgatgctttactattaaaaaagaaaatccatgtaaaaaaaaaaaaaaaaaaa

SEQ ID NO: 349 - DNA, 1021 bp, Homo sapiens
ggcacgagggtgggcatcaaggtagacaagggcgtggtccccctggcagggacaaatggcgagactaccacccaagggttggatgggctgtctgagcgctgtgcccagtacaagaaggacggagctgacttcgccaagtggcgttgtgtgctgaagattggggaacacaccccctcagccctcgccatcatggaaaatgccaatgttctggcccgttatgccagtatctgccagcagaatggcattgtgcccatcgtggagcctgagatcctccctgatggggaccatgacttgaagcgctgccagtatgtgaccgagaaggtgctggctgctgtctacaaggctctgagtgaccaccacatctacctggaaggcaccttgctgaagcccaacatggtcaccccaggccatgcttgcactcagaagttttctcatgaggagattgccatggcgaccgtcacagcgctgcgccgcacagtgccccccgctgtcactgggatcaccttcctgtctggaggccagagtgaggaggaggcgtccatcaacctcaatgccattaacaagtgccccctgctgaagccctgggccctgaccttctcctacggccgagccctgcaggcctctgccctgaaggcctggggcgggaagaaggagaacctgaaggctgcgcaggaggagtatgtcaagcgagccctggccaacagccttgcctgtcaaggaaagtacactccgagcggtcaggctggggctgctgccagcgagtccctcttcgtctctaaccacgcctattaagcggaggtgttcccaggctgcccccaacactccaggccctgccccctcccactcttgaagaggaggccgcctcctcggggctccaggctggcttgcccgcgctctttcttccctcgtgacagtggtgtgtggtgtcgtctgtgaatgctaagtccatcaccctttccggcacactgccaaataaacagctatttaagggggaaaaaaaaaaaaaaaaaaaaaaaaaaaa

SEQ ID NO: 350 - DNA, 2111 bp, Homo sapiens
aggcccagcggcgagctggctttctcctggccacttgccggggtgaggggcagccggaggagtccgagaggaagcggaggcgcgagctggaggcggcggctcccgtcggcctccggcaggactgagcgctgggaggccggaaggcgggcgcgcgcggcggagaggcgggcgggaggccggagcatattaatgaaaagtgccataaactgaaaaaccaaacatgagggtagcaggtgctgcaaagttggtggtagctgtggcagtgtttttactgacattttatgttatttctcaagtatttgaaataaaaatggatgcaagtttaggaaatctatttgcaagatcagcattggacacagctgcacgttctacaaagcctcccagatataagtgtgggatctcaaaagcttgccctgagaagcattttgcttttaaaatggcaagtggagcagccaacgtggtgggacccaaaatctgcctggaagataatgttttaatgagtggtgttaagaataatgttggaagagggatcaatgttgccttggcaaatggaaaaacaggagaagtattagacactaaatattttgacatgtggggaggagatgtggcaccatttattgagtttctgaaggccatacaagatggaacaatagttttaatgggaacatacgatgatggagcaaccaaactcaatgatgaggcacggcggctcattgctgatttggggagcacatctattactaatcttggttttagagacaactgggtcttctgtggtgggaagggcattaagacaaaaagcccttttgaacagcacataaagaacaataaggatacaaacaaatatgaaggatggcctgaagttgtagaaatggaaggatgcatcccccagaagcaagactaatggaaatgtggagagaattgaagaaagcgcactttcactcttaatgggagagctataaatggcagagctatgtgtaaatattttaagagcatgcagccatcttggtgtgtgcatgagtattgtctcttttgatatcaggattatttattgctaacgtaaatagatagcattgtaaataatcatcacaatgatcaaatcactgaaccatgtctccgcacatttccctaaaagtacaatgtttagactgctatggtaatacatattttaaattcttaatgtacacagtaaaaaactatgggaataacttgattttgtataagctatttagagtgaggctggaggtggcagcttcacagaactggagaaccaggccaagtcccctccccaacctaattaggtcattcaggacagctaagtcagtatatttagagcaatactagcatacgtttttcttaattgttatcagcattgaccaagtggtttggaaggaggcatgctttaatatcacaataattttgatttgtaaaccaagaaattaatcctgtgtttatctaacttcataatagcaattattgcccgaagctatagtggcatatttacaaaagttcttattactgggcggactgataacatttaaaaaataattgtgtttgaccccaaatgactttatacccaattctacataaaaatatagaagatctatctttttttgttaccttcagatgttcactaaataactcagtttttaagcagaagttttcagggcattaaatatatgttgtgtatgaagtatctcaaactggaacataaatttagtgatcaaactgccattcacagtgtaaggcagcacttaaatttcgaacctaaagtttagatgcattgtataaaaaaacctaaaagcagtatctgttatttagctgtaaaccaagttggaagctattcggataatttcttaaatattgatgaactttggagtactgtttcttccttcaaactgaatgtaattaattcatgaataaatgcaccttatatgtttaaacaatctttgtatacttttgggatttttggtgcttatatgctaaatcacattcagcatgtgtattttgacatttaaaatacttccctcaattctgtaaattaaaagaatagttattttacagttccagggattgtgaaataaatgttgcagttttttaaaataatgaaa

SEQ ID NO: 351 - DNA, 2843 bp, Homo sapiens
aggcccagcggcgagctggctttctcctggccacttgccggggtgaggggcagccggaggagtccgagaggaagcggaggcgcgagctggaggcggcggctcccgtcggcctccggcaggactgagcgctgggaggccggaaggcgggcgcgcgcggcggagaggcgggcgggaggccggagcatattaatgaaaagtgccataaactgaaaaaccaaacatgagggtagcaggtgctgcaaagttggtggtagctgtggcagtgtttttactgacattttatgttatttctcaagtatttgaaataaaaatggatgcaagtttaggaaatctatttgcaagatcagcattggacacagctgcacgttctacaaagcctcccagatataagtgtgggatctcaaaagcttgccctgagaagcattttgcttttaaaatggcaagtggagcagccaacgtggtgggacccaaaatctgcctggaagataatgttttaatgagtggtgttaagaataatgttggaagagggatcaatgttgccttggcaaatggaaaaacaggagaagtattagacactaaatattttgacatgtggggaggagatgtggcaccatttattgagtttctgaaggccatacaagatggaacaatagttttaatgggaacatacgatgatggagcaaccaaactcaatgatgaggcacggcggctcattgctgatttggggagcacatctattactaatcttggttttagagacaactgggtcttctgtggtgggaagggcattaagacaaaaagcccttttgaacagcacataaagaacaataaggatacaaacaaatatgaaggatggcctgaagttgtagaaatggaaggatgcatcccccagaagcaagactaatggaaatgtggagagaattgaagaaagcgcactttcactcttaatgggagagctataaatggcagagctatgtgtaaatattttaagagcatgcagccatcttggtgtgtgcatgagtattgtctcttttgatatcaggattatttattgctaacgtaaatagatagcattgtaaataatcatcacaatgatcaaatcactgaaccatgtctccgcacatttccctaaaagtacaatgtttagactgctatggtaatacatattttaaattctaaaagcatacacaatgtgtaactgaatggtttgtgaaaaatatattgatatatatactagttgctgtgaaaatatcatggaataatagggattttagggtggatactttattttcttttatatttctatatgttgccttgtgatgacattatcttttaaattaaaaagagatttggctagttgtgtgtgtaatgttactttacagtccgactctcctgatgtacctcttttcatgatctttttctttccttcccaagaaactgaggaatgtttaatatgaaaacatacatcggatatgtgaaaagcacaacaaaattcttaatgtacacagtaaaaaagtaaatatataaatgtagatggcatttaggaccacagcttgctggatttgtgttagctatgggaataacttgattttgtataagctatttagagtgaggctggaggtggcagcttcacagaactggagaaccaggccaagtcccctccccaacctaattaggtcattcaggacagctaagtcagtatatttagagcaatactagcatacgtttttcttaattgttatcagcattgaccaagtggtttggaaggaggcatgctttaatatcacaataattttgatttgtaaaccaagaaattaatcctgtgtttatctaacttcataatagcaattattgcccgaagctatagtggcatatttacaaaagttcttattactgggcggactgataacatttaaaaaataattgtgtttgaccccaaatgactttatacccaattctacataaaaatatagaagatctatctttttttgttaccttcagatgttcactaaataactcagtttttaagcagaagttttcagggcattaaatatatgttgtgtatgaagtatctcaaactggaacataaatttagtgatcaaactgccattcacagtgtaaggcagcacttaaatttcgaacctaaagtttagatgcattgtataaaaaaacctaaaagcagtatctgttatttagctgtaaaccaagttggaagctattcggataatttcttaaatattgatgaactttggagtactgtttcttccttcaaactgaatgtaattaattcatgaataaatgcaccttatatgtttaaacaatctttgtatacttttgggatttttggtgcttatatgctaaatcacattcagcatgtgtattttgacatttaaaatacttccctcaattctgtaaattaaaagaatagttattttacagttccagggattgtgaaataaatgttgcagttttttaaaataatgaaaataaatactcttggttttgctttgtgaattttttttttttttgtattatctggcaaagtaatatacctacagaacttcacaaaaactcacacaaggtttttcaagcatttattatactgcctaacttggaaaaaaaattgttgctgtggttaaaaatagtaatatcctagatgtatcttaacatgtaagaagctaagtatctagatggcggaaaaagcccttttattaagactgtaaaaggatagcttttccagatatataaaatgttaaaagaagacaaagattggttatgttaactggtgtggtttccttttgtctcagttcaatcttgtatagattgtgccaacttaactttga

SEQ ID NO: 352 - DNA, 4339 bp, Homo sapiens
atgcagtacaaaccagtgtcctccagagtccgctgtgcctacggccagagcagcgacagagccttcctcaaacctgtagtgactgccacactttgcaaggacaccgtagagggggcatgtccgcgctccaacttcctcccgacgcagcctctgattggctcctgggcttataagaaacgcgtgaatgagcagctgccgcgggcagaaagttgccggaggtctccgggtggtatcgccctttcctctttgccagcccgctggcgagccgagccagggcaagatgaggtcgtcctgtgtcctgctcaccgccctggtggcgctggccgcctattacgtctacatcccgctgcctggctccgtgtccgacccctggaagctgatgctgctggacgccactttccggggtgcacagcaagtgagtaacctgatccactacctgggactgagccatcacctgctggcactgaattttatcattgtttcttttggcaaaaaaagcgcgtggtcttctgcccaagtgaaggtgaccgacacagactttgatggtgtggaagtcagagtgtttgaaggccctccgaagcccgaagagccactgaaacgcagcgtcgtttatatccacggaggaggctgggccttggcaagtgcaaaaatcaggtattatgatgagctgtgtacagcaatggctgaggaattgaatgctgtcattgtttccattgaatacaggctagttccaaaggtttattttcctgagcaaattcatgatgttgtacgggccacaaagtatttcctgaagccagaagtcttacagaagtatatggttgatccaggcagaatttgcatttctggtgacagtgctggtggaaatctggctgctgcccttggacaacagtttactcaagatgccagcctaaaaaataagctcaaactacaagctttaatttatccagttcttcaagctttagattttaacacaccatcttatcagcaaaatgtgaacaccccaatcctgccccgctatgtcatggtgaagtattgggtggactacttcaaaggcaactatgactttgtgcaggcaatgatcgttaacaatcacacttcacttgatgtggaagaggctgctgctgtcagggcccgtctaaactggacatccctcttgcctgcatccttcacaaagaactacaagcctgttgtacagaccacaggcaatgccaggattgtccaggagcttcctcagttgctggatgcccgctccgccccactcattgcagaccaggcagtgctgcagctcctcccaaagacctacattctgacgtgtgagcatgatgtcctcagagacgatggcatcatgtatgccaagcgtttggagagtgccggtgtggaggtgaccctggatcactttgaggatggctttcacggatgtatgattttcactagctggcccaccaacttctcagtgggaatccggactaggaatagttacatcaagtggctagatcaaaacctgtaaaggagcaaaacttccagaagcctcgagcccctcttgacctcctacacctgctttggaaagacatgcactttttagttgactaattcttcctcccattcccctctacttgcgagttatggaatttctattccataactgaagtctttatgataacctaatttttaaaaatgaatttgactaacttaagtgcaaaacatgtaaatttggttcccagagtgggccaatctctctgttcttgttatcttagccaactatactgatacctacagctacagaaagcaggactaggaactggaaataactttgggtcctgccttcattaggacgttctttttagaagcagttcttccagctctggatcatagagtgacctttaataagttaaaaaaacgaggactccttaattctgctagagttaaccttgagttcagagcagtattaaatgcgtgcactttcaggtcagtactggggaccaagtaccctctggtcttttgtgaatggatggttttgtttcctatgggaattttggcaaaggttttctggaaagaacaagtttctcaaaggactttcttcctctagaatgttcattttatgagatcgctatctgtaagtccagttggattacaggaatacttgaaagttactttctaccactattagaaaatatgaagtcgcatgcactggatatctatatatcattaggtttttgttgtgtttttggttatgctgtcccccttctccttggggagatatttgggagcaaacttatttagatttagagtaaacttttcattatagagcaagtaaaaacagacaaatgaaacaacctagtgtttcacataaaaatacttctgacataaagtaccaagagcagtgtgaatatacttggcatagtcaaaaaagaaaatacatttaatattagttcaaaattgttaaaaatacctttagaaggtctagtctattattgaaaactcaattttttcacttatatggctttaaaatggagctattttgctacaatataatgtattgtttatttttttaagttatttaatgttaatatacatagctagacttaaggtttttcagaaagatgtccataataaatattaaaaacaatggtattttttaaaaaactgccttagggttttaaaaccttccctacagttataaccacgtgtaattttgtggaaatgatataacagctattaatactactataacataggcataaatattttcgtgtttatatgcatatacaagttaaaataattagaaactatgactgcgcctagtaaagtcatctaggtttatagttcagtagcttaggcaaggcacacactgctcatctccgctttttagggtcagaggaacacaagctcatgttctgagtgaagggcgtacactggcacctggtgttgcctagatcccccatctcctccttccagccaggtctggaagtttcaacagcccaagcttaacttcatgtaaagtcttcactgccagtgggaacatctttgacacaacaagacactccaattgtgatttgagttgaggatctctgcctgccttcctgccgtccttccttcttccccgatccatgctacttttaggggctgcggagagcagcagcagagctgagtaatgatacagggcaccacggagagaaagtagaaccatttcactcctgggaagatggggtatttcccacttccagcaacgaaataacaaatgaaaagttgcatacttattgatgtattgtatgagccagtagcattttatgtacaaaacagaagtcaatgcaacagtatgtatgtgtgcctgtgtgtgtataaaaataaccattgaagctaacttgctaatgtacttaggcaagccacttcccatctctgggcctcgtctttcctccctctaaaatcaaagagctgaattatgtgatccttgaggtctcttccacttataataccaactgtcttgtcagactggcaaattatattggcctctccttatgtggtggtttttttggtaggtcatagttccttatacacagacacctgcatcatcgaaggtctttttttcctaaaaaaaaaaaatgggattttagttcttattctgtgataactatcctcctcatataatactattctttttgacaccatttgaaggaaccaatatttggaccttattttgaggttgtctgtctcgaagaaaaagaaaataaaatgtataggcagggttccttcaattggcattttccccagaattgtgagccaaagcctatagtaattgcagacagcaaatgattccggatctctaaaaggctctctcagatgaaaagggagtaaaggaaaaaagaggtcaaccactgtttctgataatgtacttgagtttcattgttcttttagtttgtattcttataaaaaatgtttacactctgcagattgattttttttttttagtactgtggctttcttttcctattttatgaaaaaaatgataatctttttgtaaaattgtctgtgaaatataaacattaatatataaagaaaaaccttgaagtgctgtatagtgaagtataaattaatgttttattgatttgtgaagaatttaagactattatataattatcttggtggatctattttatgcatgaccttttaacctttgactttgcttatttcccactacgaaggggaaggtagattttatgaatgattttaatagcaaatatattttataaagtgaaaatccagtgtggaggtagcaaagcatctatctattctgaatcatgtttggaaataaaattgctccatctgggaatgtgctttcatt

SEQ ID NO: 353 - DNA, 4116 bp, Homo sapiens
cggaggtctccgggtggtatcgccctttcctctttgccagcccgctggcgagccgagccggggcaagatgaggtcgtcctgtgtcctgctcaccgccctggtggcgctggccacctattacgtctacatcccgctgcctggctccgtgtccgacccctggaagctgatgctgctggacgccactttccggggtgcacagcaagtgagtaacctgatccactacctgggactgagccatcacctgctggcactgaattttatcattgtttcttttggcaaaaaaagcgcgtggtcttctgcccaagtgaaggtgaccgacacagactttgatggtgtggaagtcagagtgtttgaaggccctccgaagcccgaagagccactgaaacgcagcgtcgtttatatccacggaggaggctgggccttggcaagtgcaaaaatcaggtattatgatgagctgtgtacagcaatggctgaggaattgaatgctgtcattgtttccattgaatacaggctagttccaaaggtttattttcctgagcaaattcatgatgttgtacgggccacaaagtatttcctgaagccagaagtcttacagaagtatatggttgatccaggcagaatttgcatttctggtgacagtgctggtggaaatctggctgctgcccttggacaacagtttactcaagatgccagcctaaaaaataagctcaaactacaagctttaatttatccagttcttcaagctttagattttaacacaccatcttatcagcaaaatgtgaacaccccaatcctgccccgctatgtcatggtgaagtattgggtggactacttcaaaggcaactatgactttgtgcaggcaatgatcgttaacaatcacacttcacttgatgtggaagaggctgctgctgtcagggcccgtctaaactggacatccctcttgcctgcatccttcacaaagaactacaagcctgttgtacagaccacaggcaatgccaggattgtccaggagcttcctcagttgctggatgcccgctccgccccactcattgcagaccaggcagtgctgcagctcctcccaaagacctacattctgacgtgtgagcatgatgtcctcagagacgatggcatcatgtatgccaagcgtttggagagtgccggtgtggaggtgaccctggatcactttgaggatggctttcacggatgtatgattttcactagctggcccaccaacttctcagtgggaatccggactaggaatagttacatcaagtggctagatcaaaacctgtaaaggagcaaaacttccagaagcctcgagcccctcttgacctcctacacctgctttggaaagacatgcactttttagttgactaattcttcctcccattcccctctacttgcgagttatggaatttctattccataactgaagtctttatgataacctaatttttaaaaatgaatttgactaacttaagtgcaaaacatgtaaatttggttcccagagtgggccaatctctctgttcttgttatcttagccaactatactcatacctacagctacagaaagcaggactaggaactggaaataactttgggtcctgccttcattaggacgttctttttagaagcagttcttccagctctggatcatagagtgacctttaataagttaaaaaaacgaggactccttaattctgctagagttaaccttgagttcagagcagtattaaatgcgtgcactttcaggtcagtactggggaccaagtaccctctggtcttttgtgaatggatggttttgtttcctatgggaattttggcaaaggttttctggaaagaacaagtttctcaaaggactttcttcctctagaatgttcattttatgagatcgctatctgtaagtccagttggattacaggaatacttgaaagttactttctaccactattagaaaatatgaagtcgcatgcactggatatctatatatcattaggtttttgttgtgtttttggttatgctgtcccccttctccttggggagatatttgggagcaaacttatttagatttagagtaaacttttcattatagagcaagtaaaaacagacaaatgaaacaacctagtgtttcacataaaaatacttctgacataaagtaccaagagcagtgtgaatatacttggcatagtcaaaaaagaaaatacatttaatattagttaaaaattgttaaaaatacctttagaaggtctagtctattattgaaaactcaattttttcacttatatggctttaaaatggagctattttgctacaatataatgtattgtttatttttttaagttatttaatgttaatatacatagctagacttaaggtttttcagaaagatgtccataataaatattaaaaacaatggtatttttaaaaaaactgccttagggttttaaaaccttccctacagttataaccacgtgtaattttgtggaaatgatataacagctattaatactactataacataggcataaatattttcgtgtttatatgcatatacaagttaaaataattagaaactatgactgcgcctagtaaagtcatctaggtttatagttcagtagcttaggcaaggcacacactgctcatctccgctttttagggtcagaggaacacaagctcatgttctgagtgaagggcgtacactggcacctggtgttgcctagatcccccatctcctccttccagccaggtctggaagtttcaacagcccaagcttaacttcatgtaaagtcttcactgccagtgggaacatctttgacacaacaagacactccaattgtgatttgagttgaggatctctgcctgccttcctgccgtccttccttcttccccgatccatgctacttttaggggctgcggagagcagcagcagagctgagtaatgatacagggcaccacggagagaaagtagaaccatttcactcctgggaagatggggtatttcccacttccagcaacgaaataacaaatgaaaagttgcatacttattgatgtattgtatgagccagtagcattttatgtacaaaacagaagtcaatgcaacagtatgtatgtgtgcctgtgtgtgtataaaaataaccattgaagctaacttgctaatgtacttaggcaagccacttcccatctctgggcctcgtctttcctccctctaaaatcaaagagctgaattatgtgatccttgaggtctcttccacttataataccaactgtcttgtcagactggcaaattatattggcctctccttatgtggtggtttttttggtaggtcatagttccttatacacggacacctgcatcatcgaaggtctttttttcctaaaaaaaaaaaatgggattttagttcttattctgtgataactatcctcctcatataatactattctttttgacaccatttgaaggaaccaatatttggaccttattttgaggttgtctgtctcgaagaaaaagaaaataaaatgtataggcagggttccttcaattggcattttccccagaattgtgagccaaagcctatagtaattgcagacagcaaatgattccggatctctaaaaggctctctcagatgaaaagggagtaaaggaaaaaagagggaggtcaaccactgtttctgataatgtacttgagtttcattgttcttttagtttgtattcttataaaaaatgtttacactctgcagattgattttttttttttagtactgtggctttcttttcctattttatgaaaaaaatgataatctttttgtaaaattgtctgtgaaatataaacattaatatataaagaaaaaccttgaagtgctgtatagtgaagtataaattaatgttttattgatttgtgaagaatttaagactattatataattatcttggtggatctattttatgcatgaccttttaacctttgactttgcttatttcccactacgaaggggaaggtagattttatgaatgattttaatagcaaatatattttataaagtgaaaatccagtgtggaggtagcaaagcatctatctattctgaatcatgtttggaaataaaattgctccatctggg

SEQ ID NO: 354 - DNA, 2375 bp, Homo sapiens
atggctcaggtggactccgggctggagctgtcctgggggagcttgtttgcggcagcggctgctgctgccactgctgtgctgggggcccggtcgccagccatggggaacacgctgcagagcttccgagaccacacttttctctatgaaaagctctacactggcaagccaaaccttgtgaatggcctccaagctcggacctttgggatctggacgctgctctcatcagtgattcgctgcctctgtgccattgacattcacaacaagacgctctatcacatcacactctggaccttcctccttgccctggggcatttcctctctgagttgtttgtctatggaactgcagctcccacgattggcgtcctggcacccctgatggtggcaagtttctccatcctgggtatgctggtcgggctccggtatctagaagtagaaccagtatccagacagaagaagagaaactgaggccagcattatcacctccaggactttctcgttttccaccttggccatcttcttccttcgtcgtctctcctctttaatttcttttctattccatcatctgcccttttattcacttttagcctctttttttaatttttaaaatttaaagatatgcatactgaaaagtatataacatgtacgtacaatttaaagaataattttaaagtgaatactacgtaactccatccaagtcaagaaattgccagcttctcggaagcccactgtgtctccttcccctacctgcaacctcttccaggctcccttttccagccttcccctttttcccttttattttcatgccttgatttgacttgtgtggtgggaacatgtgaactatgaaacttaaacctgctgcccacccagagcagctgtgaccaagggctgcctcaaggggttgtccacgcaggttgggctcctctctgctgctggacccaagactctgaaccttccaagggacaggcagttcttctaagaagggctcccctgtgtgtgagcaagaccacagctctccttctatctacagatgcatgagggttggaagagtctgggctgtttttagaccttctggtcagctgtatttgtgtaacaacttttgtaataaatagaaaaaccctctgctctgatcagttcttgtactttgacctctgctaagacaagagcatggctgcctcctctgagccctaggagaatcacagctttatgcctgattgaatacaccatagtgagtaggacagctcatgacacaggtcagcctggctgcctccggctccttactgtcatttgctcattcctcttgtattcttgaagtcaaatcttcttttttctcaccttcaagagtctgcgttcacaactaaacactaagtgccctttcttatttcctcctaaagaagaaacagattcttgagagagcagagacaaaaaaatagaactaggcagcatagatgaaacaactgcatgacatgggaagaagacaactaaaccccgaggagaatgcactggaatggacagttgctcttaaaccctacccagagggcctcccccagctggaccctcatacacagtgtgtgtatccaaaaggccattgctatttcagcaaatatttgttgagtacttctccatgccggacacttgggaaagagaaatgaacgacacaggcaatgcccctgccctgtgggccttatattatagtcaaggtaacagaatcaacaagccaacacaaaaataaagaacttcaaatagggataagaactctaacaaacacaaggtattttggtcaagaaggaatgtggggtgggcagtggggaacgtaacttaaattagatcatcagaaagtcctccctgaggagatgggatttttttgttttttagagacagggtttcactctgtcacccaggctggagtgcagtggcacaatcacacctcactgcagcctcaacttcctgggctcaagtgatcctcctgcatcagcttcccaagtagctgggactacaagtgtgtaccaccacatccagctaacatttttgggggtgggaagagatggggtcttactatgttgtccaggctaagaggtgggatttgagctgagacttgaatgcccaggagttaaatgtcttaagatatggagcaggccgttagaaaggagggagcagcaactggaaggtagaatagtcttattcaaggaataagaactatgtaatcacagcatggtgaagagttaggaagtgaaagaaaaggtcagaaaaggaggcaaggggcttataagggtgtgataagaagcttgatgtttacacttaaatacattgggaattctcttatcagttaagtctctttaggtgaaaggacaaaacctaccttaaactagcttaaacaa

SEQ ID NO: 355 - DNA, 2772 bp, Homo sapiens
ccgcgcagcgcgggcgcagagccctgccctcagctgaagggagtcttctttttttttttttttttccgctgtttttttctccgcccctaagaggttgactccaaacccggagttccgctaggtccaacaggagggcttacggcgtgagcggcgtacctggggagaggcttaggcagcggcaaccgctgattggcagtaaaggggttcactccccatctcctgctcgggcgaaaccgggacagccaatcagagagagtactgacggaaacggcccaatcctggagcagggctgagggagggggcggggacaaatggctcaggtggactccgggctggagctgtcctgggggagcttgtttgcggcagcggctgctgctgccactgctgtgctgggggcccggtcgccaggcaaaaagccctcccacgtttgaggggagtcatgagccgtttcctgaatgtgttaagaagttggctggttatggtgtccatcatagccatggggaacacgctgcagagcttccgagaccacacttttctctatgaaaagctctacactggcaagccaaaccttgtgaatggcctccaagctcggacctttgggatctggacgctgctctcatcagtgattcgctgcctctgtgccattgacattcacaacaagacgctctatcacatcacactctggaccttcctccttgccctggggcatttcctctctgagttgtttgtctatggaactgcagctcccacgattggcgtcctggcacccctgatggtggcaagtttctccatcctgggtatgctggtcgggctccggtatctagaagtagaaccagtatccagacagaagaagagaaactgaggccagcattatcacctccaggactttctcgttttccaccttggccatcttcttccttcgtcgtctctcctctttaatttcttttctattccatcatctgcccttttattcacttttagcctctttttttaatttttaaaatttaaagatatgcatactgaaaagtatataacatgtacgtacaatttaaagaataattttaaagtgaatactacgtaactccatccaagtcaagaaattgccagcttctcggaagcccactgtgtctccttcccctacctgcaacctcttccaggctcccttttccagccttcccctttttcccttttattttcatgccttgatttgacttgtgtggtgggaacatgtgaactatgaaacttaaacctgctgcccacccagagcagctgtgaccaagggctgcctcaaggggttgtccacgcaggttgggctcctctctgctgctggacccaagactctgaaccttccaagggacaggcagttcttctaagaagggctcccctgtgtgtgagcaagaccacagctctccttctatctacagatgcatgagggttggaagagtctgggctgtttttagaccttctggtcagctgtatttgtgtaacaacttttgtaataaatagaaaaaccctctgctctgatcagttcttgtactttgacctctgctaagacaagagcatggctgcctcctctgagccctaggagaatcacagctttatgcctgattgaatacaccatagtgagtaggacagctcatgacacaggtcagcctggctgcctccggctccttactgtcatttgctcattcctcttgtattcttgaagtcaaatcttcttttttctcaccttcaagagtctgcgttcacaactaaacactaagtgccctttcttatttcctcctaaagaagaaacagattcttgagagagcagagacaaaaaaatagaactaggcagcatagatgaaacaactgcatgacatgggaagaagacaactaaaccccgaggagaatgcactggaatggacagttgctcttaaaccctacccagagggcctcccccagctggaccctcatacacagtgtgtgtatccaaaaggccattgctatttcagcaaatatttgttgagtacttctccatgccggacacttgggaaagagaaatgaacgacacaggcaatgcccctgccctgtgggccttatattatagtcaaggtaacagaatcaacaagccaacacaaaaataaagaacttcaaatagggataagaactctaacaaacacaaggtattttggtcaagaaggaatgtggggtgggcagtggggaacgtaacttaaattagatcatcagaaagtcctccctgaggagatgggatttttttgttttttagagacagggtttcactctgtcacccaggctggagtgcagtggcacaatcacacctcactgcagcctcaacttcctgggctcaagtgatcctcctgcatcagcttcccaagtagctgggactacaagtgtgtaccaccacatccagctaacatttttgggggtgggaagagatggggtcttactatgttgtccaggctaagaggtgggatttgagctgagacttgaatgcccaggagttaaatgtcttaagatatggagcaggccgttagaaaggagggagcagcaactggaaggtagaatagtcttattcaaggaataagaactatgtaatcacagcatggtgaagagttaggaagtgaaagaaaaggtcagaaaaggaggcaaggggcttataagggtgtgataagaagcttgatgtttacacttaaatacattgggaattctcttatcagttaagtctctttaggtgaaaggacaaaacctaccttaaactagcttaaacaa

SEQ ID NO: 356 - DNA, 5895 bp, Homo sapiens
gtcagtcaagggaatttctatctaagcacttaccagcaatttgagctccttctcttttggtctaggtggctctaaaataacaataaaggctacagtgattgaaattcaccagacttgaaatagactgcagccttcttccttcccaccttcttagaatctttgtcctattcatcttccttacgcttccccgggttctcttacttctggattctaacagtgagttgtgagaagcaacgcggaaaacggaatggagactccagcttgttttaaacgagctgtattaccccgcacagtgcaggagaaaagataattggctcaggtctcggctctgccatctaccacctgtggagccttagataagtcagttcttatctctgtcactcaacggtctcggtcttgtcatcttttacatggaatgtcatgaaatatacagtacattgcaggaactgcctcaggtaaagacttctagggttcagtaggtctcagtcgatccctctgagaaaggccgcaccctaaatgcacagactctgactctaaggggatggggtcggggaatctgcattttagtagcttctcaggtgattcagatgctcagtcaggattgagaaaccaggactcttcccagccctcctgttctctgatccacttctctgcttcctccacgtcctaacgattctccagttcccgcacagcaggagcggagggaagaggggagagaaggcaccgctaaggaccgctggccccgccaggcggccgacctccccattccaggggcgccagccggcggattacataacgggcctcggggcgcgttctcgcgaggtttccaccgccccctcctcgctccacgtcagagggaaccgggcggagcggccaacatggcggaacgcaggagacacaagaagcggatccaggaagttggtgaaccatctaaagaagagaaggctgtggccaagtatcttcgattcaactgtccaacaaagtccaccaatatgatgggtcaccgggttgattattttattgcttcaaaagcagtggactgtcttttggattcaaagtgggcaaaggccaagaaaggagaggaagctttatttacaaccagggagtctgtggttgactactgcaacaggcttttaaagaagcagttttttcaccgagccctaaaagtaatgaaaatgaaatatgataaagacataaagaaagaaaaagataaaggaaaagctgaaagtggaaaagaagaagataaaaagagcaagaaagaaaatataaaggatgagaagacaaaaaaagaaaaagagaaaaaaaaagatggtgaaaaggaagaatccaaaaaggaggaaactccaggaactcctaaaaagaaggaaactaagaaaaaattcaaacttgagccacatgatgatcaggtttttctggatggaaatgaggtgtatgtatggatctatgacccagttcactttaaaacatttgtcatgggattaattcttgtgattgcagtaatagcggccaccctcttccccctttggccagcagaaatgagagtaggtgtttattacctcagtgtgggtgcaggctgttttgtagccagtattcttctccttgctgttgctcgatgcattctatttctcatcatttggctcataactggaggaaggcaccacttttggttcttgccaaatctgactgctgatgtgggcttcattgactccttcaggcctctgtacacacatgaatacaaaggaccaaaagcagacttaaagaaagatgagaagtctgaaaccaaaaagcaacagaagtccgacagtgaggaaaagtcagacagtgagaaaaaggaagatgaggaggggaaagtaggaccaggaaatcatggaacagaaggctcggggggagaacggcattcagacacggacagtgacaggagggaagatgatcgatcccagcacagtagtggaaatggaaatgattttgaaatgataacaaaagaggaactggaacagcaaacagatggggattgtgaagaggatgaggaagaggaaaatgatggagaaacacctaaatcttcacatgaaaaatcataatctgactaattttgggactgaatgaataagtacaagaggttggattttctatgttggctgattaccatattgaacacatggcatttgtagcattctttaaatctatctactgaaatgtatttgacattcaagcagttatattcggtccttcattttatagaatattggcactattattggtacagtttaaagccattaatatgttttatccatttgataattttacagtaagtaggtctcattcattttgacagttatcaaagatgtactttccacagttaaatttacattaatggcaatttttgatagttttatggctttttactgttagactaatcaaaaataactttaaaaggaacaaagaaactccaacatttcacattatgcatagttatgtagccatttcacagtttctttaagatgtgtaaactcattgtccttgatagtttttatttttcattataaaattataccaggagatttcttttaagattctgagttagcagagttcaaaactattttgtggaaacaagccaactagtaacaatgcagcaacacttctggtttagctaaattatttttccaatgtaggaaatccacactgatttgtacgtctgactgagagaaagatggtcgtctccagcagagaaagtgaacagcatttgttggaaggtgatggctctccctcctccctccccatttcattggcgtaacgtaaagtgtattctgtacataatttacaaataaaacattttattttaattgttacttattatttagatatttctcaacacttaaattcataaaattaagaccatgtaagggtatgtttttagagaaatggaagtttgagtaacccacagaacatctgtgatctttctacagcagcttcagttttgtgccaacattccatgtattttgaatatgagcaaaaactgatcttaagagcagacttaaagtagctttgtacgccttaatgttcattttgatttattttaaatctttacattcagaaatgagatactgtattatcagaccaggaggcattgctgtgaaagataatttcctattctaaaatatcaaatttaaaataaagataatgaaagaaaacataagagaactattggactctaattgctttgaactagttttgcagtttgactttacgtcttatacatcttagttacaagtctttggaaactcttgtttacttatgagcataatcattccttggagttatactaactaataatgaatattaaatgatttttcttcagtcacagtgagagcatcttgctttgtggttgaaataggtagtgtatgtcagtctttgctttaggctgtttctcatctaagtgtttgaattaaagatgttaaatttttctaattgtgaaaaatatgttttctgtatcgacacattttattaaacttggcttgattgcttctttatagtagtccctgtaagtggacataaatgtggctatttgatgttaatgcaactatgtcaaggctgcaatcactttaatagtttctttttagcaaataaatgttcattgatgaagtgcctgggtattttcccgtcccatttgcagagctctactacttcatttccacagtaagcatatatataatgatcacttctgagtttatcaccagtaacattgatacctattttggggtataaacatggtgtttttcagaaataaaaattatttcattaacctttactattactgtgataatacccaggcactcaatattcatcctgaaattttttataatatatgtaatttgtctagtcttaaagacatttggagcatggccaacaggaaggtcagcttcttactgatgtgtgtggattcttacagaatgttagtacaaatttttataaatatttggtgatccctggggggaaatatcattcttactatggttagaaagtgaattagaaatttcagctcagtttctattttactattcaagttgtgtactttaaacaaatataaaaatcaaaaggctgcctctattacaatcctcagtggaatagatggctatctttcttggctaacattaaatattcttgtaccagagcatggaaaatcgtttataattgttaatagaatggcgatttttttttaagaacttcagatttgctatgctgctgtaagtagaaagcatgaagctttttgatcatgtagggcttattgtagagggtatcaattggcctaactaagcaggattgaatttaccagaggctaagttcagatagtaagaataatgcatatgtgattgttcttaaagtcaatgtattaaataaggtatttttccttttccctcttactggatttttcaattttcaaaccatatggcctaggtaactttaattgaaataatatagatttagttgaatactattcaggaagtaataaattttaatatatcacattgaaattatgcagtggtgatgaattttggtgtttcccccctctttctggttttacatcatgaggatcagttagctgctgacaagaaaagtcatcttgtgtcttttgtaaattgaattttttttttaaatctattaggaactggaaaacagcaagtatggttgattctcattattcaaggtagttacgttctataaagtcactgcgaacactgaattagcaaatatagaacctaggggaaatacaaggctagatttctgcaagccactggtcacattttcatcaagcagtcaacatgtaaatttctgttgtaaagacaccttatttaatataatcgattcattaacattgaagtcatgaccaacaacactgtaactcatgcctgaatgaagcttatctgacacataagcttcataaggcacacaacagcctttttacccttaggaacagctttttgcccttagcactatgcttgggggccattttaaacagtgaaatcaaaaaaagaacagaaatgcaaaaaccatggcattagcgtaaaaaggacacgtttatagtatgaaagctggaacatggccttgttcaacctcagctcagaatatgtgtacagcaagttttttgctgtaccacaaaattttaggttaggcaaattcacaaatacggaatccatgaataacgaggatcaactgtacttaactatattttaaagctgtgacatttatctacctggtttatggaatagaatttattgctgaatcatgctccagtatttgagtgatgttttaaatatcctatgtctgaaaataattcctcctaattgtgtggtaatttgcttttactgtttccacagtatttcaggtctttgctcattcactcagtaatactgagcacttaccatgtaccagaattttactaggcacaaccatgaataaaaatacaattctcttgcaccattaaatagtgtgttaagtgctacggcagcaaattgctacatgtgctggatatctcttgttttcccctccagctccactctgctcttgcccacaaagctgacccgaatggaccacagcagtgggctcctatgcctcctggcttctgagtgggtttggccaaggagtgtcctggccagagatcagaggatggtagggtgcctattctcggctcttctcctggggttggggggctgccttagcagccaaaggtcacttctcccaaactccttccctgctttccaggttgccagtccctgcactcttcctttctggccaaggatgatgtcagttctgctgctactagcctggagttgcagaagctactgtgcttcctctttgggtagcctatacctatacttatctcctcataatatcttcatg

SEQ ID NO: 357 - DNA, 5105 bp, Homo sapiens
tcagtcaagggaatttctatctaagcacttaccagcaatttgagctccttctcttttggtctaggtggctctaaaataacaataaaggctacagtgattgaaattcaccagacttgaaatagactgcagccttcttccttcccaccttcttagaatctttgtcctattcatcttccttacgcttccccgggttctcttacttctggattctaacagtgagttgtgagaagcaacgcggaaaacggaatggagactccagcttgttttaaacgagctgtattaccccgcacagtgcaggagaaaagataattggctcaggtctcggctctgccatctaccacctgtggagccttagataagtcagttcttatctctgtcactcaacggtctcggtcttgtcatcttttacatggaatgtcatgaaatatacagtacattgcaggaactgcctcaggtaaagacttctagggttcagtaggtctcagtcgatccctctgagaaaggccgcaccctaaatgcacagactctgactctaaggggatggggtcggggaatctgcattttagtagcttctcaggtgattcagatgctcagtcaggattgagaaaccaggactcttcccagccctcctgttctctgatccacttctctgcttcctccacgtcctaacgattctccagttcccgcacagcaggagcggagggaagaggggagagaaggcaccgctaaggaccgctggccccgccaggcggccgacctccccattccaggggcgccagccggcggattacataacgggcctcggggcgcgttctcgcgaggtttccaccgccccctcctcgctccacgtcagagggaaccgggcggagcggccaacatggcggaacgcaggagacacaagaagcggatccaggaagttggtgaaccatctaaagaagagaaggctgtggccaagtatcttcgattcaactgtccaacaaagtccaccaatatgatgggtcaccgggttgattattttattgcttcaaaagcagtggactgtcttttggattcaaagtgggcaaaggccaagaaaggagaggaagctttatttacaaccagggagtctgtggttgactactgcaacaggcttttaaagaagcagttttttcaccgagccctaaaagtaatgaaaatgaaatatgataaagacataaagaaagaaaaagataaaggaaaagctgaaagtggaaaagaagaagataaaaagagcaagaaagaaaatataaaggatgagaagacaaaaaaagaaaaagagaaaaaaaaagatggtgaaaaggaagaatccaaaaaggaggaaactccaggaactcctaaaaagaaggaaactaagaaaaaattcaaacttgagccacatgatgatcaggtttttctggatggaaatgaggtgtatgtatggatctatgacccagttcactttaaaacatttgtcatgggattaattcttgtgattgcagtaatagcggccaccctcttccccctttggccagcagaaatgagagtaggtgtttattacctcagtgtgggtgcaggctgttttgtagccagtattcttctccttgctgttgctcgatgcattctatttctcatcatttggctcataactggaggaaggcaccacttttggttcttgccaaatctgactgctgatgtgggcttcattgactccttcaggcctctgtacacacatgaatacaaaggaccaaaagcagacttaaagaaagatgagaagtctgaaaccaaaaagcaacagaagtccgacagtgaggaaaagtcagacagtgagaaaaaggaagatgaggaggggaaagtaggaccaggaaatcatggaacagaaggctcggggggagaacggcattcagacacggacagtgacaggagggaagatgatcgatcccagcacagtagtggaaatggaaatgattttgaaatgataacaaaagaggaactggaacagcaaacagatggggattgtgaagaggatgaggaagaggaaaatgatggagaaacacctaaatcttcacatgaaaaatcataatctgactaattttgggactgaatgaataagtacaagaggaaatccacactgatttgtacgtctgactgagagaaagatggtcgtctccagcagagaaagtgaacagcatttgttggaaggtgatggctctccctcctccctccccatttcattggcgtaacgtaaagtgtattctgtacataatttacaaataaaacattttattttaattgttacttattatttagatatttctcaacacttaaattcataaaattaagaccatgtaagggtatgtttttagagaaatggaagtttgagtaacccacagaacatctgtgatctttctacagcagcttcagttttgtgccaacattccatgtattttgaatatgagcaaaaactgatcttaagagcagacttaaagtagctttgtacgccttaatgttcattttgatttattttaaatctttacattcagaaatgagatactgtattatcagaccaggaggcattgctgtgaaagataatttcctattctaaaatatcaaatttaaaataaagataatgaaagaaaacataagagaactattggactctaattgctttgaactagttttgcagtttgactttacgtcttatacatcttagttacaagtctttggaaactcttgtttacttatgagcataatcattccttggagttatactaactaataatgaatattaaatgatttttcttcagtcacagtgagagcatcttgctttgtggttgaaataggtagtgtatgtcagtctttgctttaggctgtttctcatctaagtgtttgaattaaagatgttaaatttttctaattgtgaaaaatatgttttctgtatcgacacattttattaaacttggcttgattgcttctttatagtagtccctgtaagtggacataaatgtggctatttgatgttaatgcaactatgtcaaggctgcaatcactttaatagtttctttttagcaaataaatgttcattgatgaagtgcctgggtattttcccgtcccatttgcagagctctactacttcatttccacagtaagcatatatataatgatcacttctgagtttatcaccagtaacattgatacctattttggggtataaacatggtgtttttcagaaataaaaattatttcattaacctttactattactgtgataatacccaggcactcaatattcatcctgaaattttttataatatatgtaatttgtctagtcttaaagacatttggagcatggccaacaggaaggtcagcttcttactgatgtgtgtggattcttacagaatgttagtacaaatttttataaatatttggtgatccctggggggaaatatcattcttactatggttagaaagtgaattagaaatttcagctcagtttctattttactattcaagttgtgtactttaaacaaatataaaaatcaaaaggctgcctctattacaatcctcagtggaatagatggctatctttcttggctaacattaaatattcttgtaccagagcatggaaaatcgtttataattgttaatagaatggcgatttttttttaagaacttcagatttgctatgctgctgtaagtagaaagcatgaagctttttgatcatgtagggcttattgtagagggtatcaattggcctaactaagcaggattgaatttaccagaggctaagttcagatagtaagaataatgcatatgtgattgttcttaaagtcaatgtattaaataaggtatttttccttttccctcttactggatttttcaattttcaaaccatatggcctaggtaactttaattgaaataatatagatttagttgaatactattcaggaagtaataaattttaatatatcacattgaaattatgcagtggtgatgaattttggtgtttcccccctctttctggttttacatcatgaggatcagttagctgctgacaagaaaagtcatcttgtgtcttttgtaaattgaattttttttttaaatctattaggaactggaaaacagcaagtatggttgattctcattattcaaggtagttacgttctataaagtcactgcgaacactgaattagcaaatatagaacctaggggaaatacaaggctagatttctgcaagccactggtcacattttcatcaagcagtcaacatgtaaatttctgttgtaaagacaccttatttaatataatcgattcattaacattgaagtcatgaccaacaacactgtaactcatgcctgaatgaagcttatctgacacataagcttcataaggcacacaacagcctttttacccttaggaacagctttttgcccttagcactatgcttgggggccattttaaacagtgaaatcaaaaaaagaacagaaatgcaaaaaccatggcattagcgtaaaaaggacacgtttatagtatgaaagctggaacatggccttgttcaacctcagctcagaatatgtgtacagcaagttttttgctgtaccacaaaattttaggttaggcaaattcacaaatacggaatccatgaataacgaggatcaactgtacttaactatattttaaagctgtgacatttatctacctggtttatggaatagaatttattgctgaatcatgctccagtatttgagtgatgttttaaatatcctatgtctgaaaataattcctcctaattgtgtggtaatttgcttttactgtttccacagtatttcaggtctttgctcattcactcagtaatactgagcacttaccatgtaccagaattttactaggcacaaccatgaataaaaatacaattctcttgcaccattaaatagtgtgttaagtgctacggcagcaaattgctacatgtgctggatatctcttgttttcccctccagctccactctgctcttgcccacaaagctgacccgaatggaccacagcagtgggctcctatgcctcctggcttctgagtgggtttggccaaggagtgtcctggccagagatcaga

SEQ ID NO: 358 - DNA, 5834 bp, Homo sapiens
gtcagtcaagggaatttctatctaagcacttaccagcaatttgagctccttctcttttggtctaggtggctctaaaataacaataaaggctacagtgattgaaattcaccagacttgaaatagactgcagccttcttccttcccaccttcttagaatctttgtcctattcatcttccttacgcttccccgggttctcttacttctggattctaacagtgagttgtgagaagcaacgcggaaaacggaatggagactccagcttgttttaaacgagctgtattaccccgcacagtgcaggagaaaagataattggctcaggtctcggctctgccatctaccacctgtggagccttagataagtcagttcttatctctgtcactcaacggtctcggtcttgtcatcttttacatggaatgtcatgaaatatacagtacattgcaggaactgcctcaggtaaagacttctagggttcagtaggtctcagtcgatccctctgagaaaggccgcaccctaaatgcacagactctgactctaaggggatggggtcggggaatctgcattttagtagcttctcaggtgattcagatgctcagtcaggattgagaaaccaggactcttcccagccctcctgttctctgatccacttctctgcttcctccacgtcctaacgattctccagttcccgcacagcaggagcggagggaagaggggagagaaggcaccgctaaggaccgctggccccgccaggcggccgacctccccattccaggggcgccagccggcggattacataacgggcctcggggcgcgttctcgcgaggtttccaccgccccctcctcgctccacgtcagagggaaccgggcggagcggccaacatggcggaacgcaggagacacaagaagcggatccaggaagttggtgaaccatctaaagaagagaaggctgtggccaagtatcttcgattcaactgtccaacaaagtccaccaatatgatgggtcaccgggttgattattttattgcttcaaaagcagtggactgtcttttggattcaaagtgggcaaaggccaagaaaggagaggaagctttatttacaaccagggagtctgtggttgactactgcaacaggcttttaaagaagcagttttttcaccgagccctaaaagtaatgaaaatgaaatatgataaagacataaagaaagaaaaagataaaggaaaagctgaaagtggaaaagaagaagataaaaagagcaagaaagaaaatataaaggatgagaagacaaaaaaagaaaaagagaaaaaaaaagatggtgaaaaggaagaatccaaaaaggaggaaactccaggaactcctaaaaagaaggaaactaagaaaaaattcaaacttgagccacatgatgatcaggtttttctggatggaaatgagtgattgcagtaatagcggccaccctcttccccctttggccagcagaaatgagagtaggtgtttattacctcagtgtgggtgcaggctgttttgtagccagtattcttctccttgctgttgctcgatgcattctatttctcatcatttggctcataactggaggaaggcaccacttttggttcttgccaaatctgactgctgatgtgggcttcattgactccttcaggcctctgtacacacatgaatacaaaggaccaaaagcagacttaaagaaagatgagaagtctgaaaccaaaaagcaacagaagtccgacagtgaggaaaagtcagacagtgagaaaaaggaagatgaggaggggaaagtaggaccaggaaatcatggaacagaaggctcggggggagaacggcattcagacacggacagtgacaggagggaagatgatcgatcccagcacagtagtggaaatggaaatgattttgaaatgataacaaaagaggaactggaacagcaaacagatggggattgtgaagaggatgaggaagaggaaaatgatggagaaacacctaaatcttcacatgaaaaatcataatctgactaattttgggactgaatgaataagtacaagaggttggattttctatgttggctgattaccatattgaacacatggcatttgtagcattctttaaatctatctactgaaatgtatttgacattcaagcagttatattcggtccttcattttatagaatattggcactattattggtacagtttaaagccattaatatgttttatccatttgataattttacagtaagtaggtctcattcattttgacagttatcaaagatgtactttccacagttaaatttacattaatggcaatttttgatagttttatggctttttactgttagactaatcaaaaataactttaaaaggaacaaagaaactccaacatttcacattatgcatagttatgtagccatttcacagtttctttaagatgtgtaaactcattgtccttgatagtttttatttttcattataaaattataccaggagatttcttttaagattctgagttagcagagttcaaaactattttgtggaaacaagccaactagtaacaatgcagcaacacttctggtttagctaaattatttttccaatgtaggaaatccacactgatttgtacgtctgactgagagaaagatggtcgtctccagcagagaaagtgaacagcatttgttggaaggtgatggctctccctcctccctccccatttcattggcgtaacgtaaagtgtattctgtacataatttacaaataaaacattttattttaattgttacttattatttagatatttctcaacacttaaattcataaaattaagaccatgtaagggtatgtttttagagaaatggaagtttgagtaacccacagaacatctgtgatctttctacagcagcttcagttttgtgccaacattccatgtattttgaatatgagcaaaaactgatcttaagagcagacttaaagtagctttgtacgccttaatgttcattttgatttattttaaatctttacattcagaaatgagatactgtattatcagaccaggaggcattgctgtgaaagataatttcctattctaaaatatcaaatttaaaataaagataatgaaagaaaacataagagaactattggactctaattgctttgaactagttttgcagtttgactttacgtcttatacatcttagttacaagtctttggaaactcttgtttacttatgagcataatcattccttggagttatactaactaataatgaatattaaatgatttttcttcagtcacagtgagagcatcttgctttgtggttgaaataggtagtgtatgtcagtctttgctttaggctgtttctcatctaagtgtttgaattaaagatgttaaatttttctaattgtgaaaaatatgttttctgtatcgacacattttattaaacttggcttgattgcttctttatagtagtccctgtaagtggacataaatgtggctatttgatgttaatgcaactatgtcaaggctgcaatcactttaatagtttctttttagcaaataaatgttcattgatgaagtgcctgggtattttcccgtcccatttgcagagctctactacttcatttccacagtaagcatatatataatgatcacttctgagtttatcaccagtaacattgatacctattttggggtataaacatggtgtttttcagaaataaaaattatttcattaacctttactattactgtgataatacccaggcactcaatattcatcctgaaattttttataatatatgtaatttgtctagtcttaaagacatttggagcatggccaacaggaaggtcagcttcttactgatgtgtgtggattcttacagaatgttagtacaaatttttataaatatttggtgatccctggggggaaatatcattcttactatggttagaaagtgaattagaaatttcagctcagtttctattttactattcaagttgtgtactttaaacaaatataaaaatcaaaaggctgcctctattacaatcctcagtggaatagatggctatctttcttggctaacattaaatattcttgtaccagagcatggaaaatcgtttataattgttaatagaatggcgatttttttttaagaacttcagatttgctatgctgctgtaagtagaaagcatgaagctttttgatcatgtagggcttattgtagagggtatcaattggcctaactaagcaggattgaatttaccagaggctaagttcagatagtaagaataatgcatatgtgattgttcttaaagtcaatgtattaaataaggtatttttccttttccctcttactggatttttcaattttcaaaccatatggcctaggtaactttaattgaaataatatagatttagttgaatactattcaggaagtaataaattttaatatatcacattgaaattatgcagtggtgatgaattttggtgtttcccccctctttctggttttacatcatgaggatcagttagctgctgacaagaaaagtcatcttgtgtcttttgtaaattgaattttttttttaaatctattaggaactggaaaacagcaagtatggttgattctcattattcaaggtagttacgttctataaagtcactgcgaacactgaattagcaaatatagaacctaggggaaatacaaggctagatttctgcaagccactggtcacattttcatcaagcagtcaacatgtaaatttctgttgtaaagacaccttatttaatataatcgattcattaacattgaagtcatgaccaacaacactgtaactcatgcctgaatgaagcttatctgacacataagcttcataaggcacacaacagcctttttacccttaggaacagctttttgcccttagcactatgcttgggggccattttaaacagtgaaatcaaaaaaagaacagaaatgcaaaaaccatggcattagcgtaaaaaggacacgtttatagtatgaaagctggaacatggccttgttcaacctcagctcagaatatgtgtacagcaagttttttgctgtaccacaaaattttaggttaggcaaattcacaaatacggaatccatgaataacgaggatcaactgtacttaactatattttaaagctgtgacatttatctacctggtttatggaatagaatttattgctgaatcatgctccagtatttgagtgatgttttaaatatcctatgtctgaaaataattcctcctaattgtgtggtaatttgcttttactgtttccacagtatttcaggtctttgctcattcactcagtaatactgagcacttaccatgtaccagaattttactaggcacaaccatgaataaaaatacaattctcttgcaccattaaatagtgtgttaagtgctacggcagcaaattgctacatgtgctggatatctcttgttttcccctccagctccactctgctcttgcccacaaagctgacccgaatggaccacagcagtgggctcctatgcctcctggcttctgagtgggtttggccaaggagtgtcctggccagagatcagaggatggtagggtgcctattctcggctcttctcctggggttggggggctgccttagcagccaaaggtcacttctcccaaactccttccctgctttccaggttgccagtccctgcactcttcctttctggccaaggatgatgtcagttctgctgctactagcctggagttgcagaagctactgtgcttcctctttgggtagcctatacctatacttatctcctcataatatcttcatg

SEQ ID NO: 359 - DNA, 5727 bp, Homo sapiens
tttaaacgagctgtattaccccgcacagtgcaggagaaaagataattggctcaggtctcggctctgccatctaccacctgtggagccttagataagtcagttcttatctctgtcactcaacggtctcggtcttgtcatcttttacatggaatgtcatgaaatatacagtacattgcaggaactgcctcaggtaaagacttctagggttcagtaggtctcagtcgatccctctgagaaaggccgcaccctaaatgcacagactctgactctaaggggatggggtcggggaatctgcattttagtagcttctcaggtgattcagatgctcagtcaggattgagaaaccaggactcttcccagccctcctgttctctgatccacttctctgcttcctccacgtcctaacgattctccagttcccgcacagcaggagcggagggaagaggggagagaaggcaccgctaaggaccgctggccccgccaggcggccgacctccccattccaggggcgccagccggcggattacataacgggcctcggggcgcgttctcgcgaggtttccaccgccccctcctcgctccacgtcagagggaaccgggcggagcggccaacatggcggaacgcaggagacacaagaagcggatccagtataatttcagattctcgtgtcccatcgaagtttctagcaagaggactgttgtcacatttccttcttggactcattactggtcactgaaaaccagaagaagttggtgaaccatctaaagaagagaaggctgtggccaagtatcttcgattcaactgtccaacaaagtccaccaatatgatgggtcaccgggttgattattttattgcttcaaaagcagtggactgtcttttggattcaaagtgggcaaaggccaagaaaggagaggaagctttatttacaaccagggagtctgtggttgactactgcaacaggcttttaaagaagcagttttttcaccgagccctaaaagtaatgaaaatgaaatatgataaagacataaagaaagaaaaagataaaggaaaagctgaaagtggaaaagaagaagataaaaagagcaagaaagaaaatataaaggatgagaagacaaaaaaagaaaaagagaaaaaaaaagatggtgaaaaggaagaatccaaaaaggaggaaactccaggaactcctaaaaagaaggaaactaagaaaaaattcaaacttgagccacatgatgatcaggtttttctggatggaaatgaggtgtatgtatggatctatgacccagttcactttaaaacatttgtcatgggattaattcttgtgattgcagtaatagcggccaccctcttccccctttggccagcagaaatgagagtaggtgtttattacctcagtgtgggtgcaggctgttttgtagccagtattcttctccttgctgttgctcgatgcattctatttctcatcatttggctcataactggaggaaggcaccacttttggttcttgccaaatctgactgctgatgtgggcttcattgactccttcaggcctctgtacacacatgaatacaaaggaccaaaagcagacttaaagaaagatgagaagtctgaaaccaaaaagcaacagaagtccgacagtgaggaaaagtcagacagtgagaaaaaggaagatgaggaggggaaagtaggaccaggaaatcatggaacagaaggctcggggggagaacggcattcagacacggacagtgacaggagggaagatgatcgatcccagcacagtagtggaaatggaaatgattttgaaatgataacaaaagaggaactggaacagcaaacagatggggattgtgaagaggatgaggaagaggaaaatgatggagaaacacctaaatcttcacatgaaaaatcataatctgactaattttgggactgaatgaataagtacaagaggttggattttctatgttggctgattaccatattgaacacatggcatttgtagcattctttaaatctatctactgaaatgtatttgacattcaagcagttatattcggtccttcattttatagaatattggcactattattggtacagtttaaagccattaatatgttttatccatttgataattttacagtaagtaggtctcattcattttgacagttatcaaagatgtactttccacagttaaatttacattaatggcaatttttgatagttttatggctttttactgttagactaatcaaaaataactttaaaaggaacaaagaaactccaacatttcacattatgcatagttatgtagccatttcacagtttctttaagatgtgtaaactcattgtccttgatagtttttatttttcattataaaattataccaggagatttcttttaagattctgagttagcagagttcaaaactattttgtggaaacaagccaactagtaacaatgcagcaacacttctggtttagctaaattatttttccaatgtaggaaatccacactgatttgtacgtctgactgagagaaagatggtcgtctccagcagagaaagtgaacagcatttgttggaaggtgatggctctccctcctccctccccatttcattggcgtaacgtaaagtgtattctgtacataatttacaaataaaacattttattttaattgttacttattatttagatatttctcaacacttaaattcataaaattaagaccatgtaagggtatgtttttagagaaatggaagtttgagtaacccacagaacatctgtgatctttctacagcagcttcagttttgtgccaacattccatgtattttgaatatgagcaaaaactgatcttaagagcagacttaaagtagctttgtacgccttaatgttcattttgatttattttaaatctttacattcagaaatgagatactgtattatcagaccaggaggcattgctgtgaaagataatttcctattctaaaatatcaaatttaaaataaagataatgaaagaaaacataagagaactattggactctaattgctttgaactagttttgcagtttgactttacgtcttatacatcttagttacaagtctttggaaactcttgtttacttatgagcataatcattccttggagttatactaactaataatgaatattaaatgatttttcttcagtcacagtgagagcatcttgctttgtggttgaaataggtagtgtatgtcagtctttgctttaggctgtttctcatctaagtgtttgaattaaagatgttaaatttttctaattgtgaaaaatatgttttctgtatcgacacattttattaaacttggcttgattgcttctttatagtagtccctgtaagtggacataaatgtggctatttgatgttaatgcaactatgtcaaggctgcaatcactttaatagtttctttttagcaaataaatgttcattgatgaagtgcctgggtattttcccgtcccatttgcagagctctactacttcatttccacagtaagcatatatataatgatcacttctgagtttatcaccagtaacattgatacctattttggggtataaacatggtgtttttcagaaataaaaattatttcattaacctttactattactgtgataatacccaggcactcaatattcatcctgaaattttttataatatatgtaatttgtctagtcttaaagacatttggagcatggccaacaggaaggtcagcttcttactgatgtgtgtggattcttacagaatgttagtacaaatttttataaatatttggtgatccctggggggaaatatcattcttactatggttagaaagtgaattagaaatttcagctcagtttctattttactattcaagttgtgtactttaaacaaatataaaaatcaaaaggctgcctctattacaatcctcagtggaatagatggctatctttcttggctaacattaaatattcttgtaccagagcatggaaaatcgtttataattgttaatagaatggcgatttttttttaagaacttcagatttgctatgctgctgtaagtagaaagcatgaagctttttgatcatgtagggcttattgtagagggtatcaattggcctaactaagcaggattgaatttaccagaggctaagttcagatagtaagaataatgcatatgtgattgttcttaaagtcaatgtattaaataaggtatttttccttttccctcttactggatttttcaattttcaaaccatatggcctaggtaactttaattgaaataatatagatttagttgaatactattcaggaagtaataaattttaatatatcacattgaaattatgcagtggtgatgaattttggtgtttcccccctctttctggttttacatcatgaggatcagttagctgctgacaagaaaagtcatcttgtgtcttttgtaaattgaattttttttttaaatctattaggaactggaaaacagcaagtatggttgattctcattattcaaggtagttacgttctataaagtcactgcgaacactgaattagcaaatatagaacctaggggaaatacaaggctagatttctgcaagccactggtcacattttcatcaagcagtcaacatgtaaatttctgttgtaaagacaccttatttaatataatcgattcattaacattgaagtcatgaccaacaacactgtaactcatgcctgaatgaagcttatctgacacataagcttcataaggcacacaacagcctttttacccttaggaacagctttttgcccttagcactatgcttgggggccattttaaacagtgaaatcaaaaaaagaacagaaatgcaaaaaccatggcattagcgtaaaaaggacacgtttatagtatgaaagctggaacatggccttgttcaacctcagctcagaatatgtgtacagcaagttttttgctgtaccacaaaattttaggttaggcaaattcacaaatacggaatccatgaataacgaggatcaactgtacttaactatattttaaagctgtgacatttatctacctggtttatggaatagaatttattgctgaatcatgctccagtatttgagtgatgttttaaatatcctatgtctgaaaataattcctcctaattgtgtggtaatttgcttttactgtttccacagtatttcaggtctttgctcattcactcagtaatactgagcacttaccatgtaccagaattttactaggcacaaccatgaataaaaatacaattctcttgcaccattaaatagtgtgttaagtgctacggcagcaaattgctacatgtgctggatatctcttgttttcccctccagctccactctgctcttgcccacaaagctgacccgaatggaccacagcagtgggctcctatgcctcctggcttctgagtgggtttggccaaggagtgtcctggccagagatcagaggatggtagggtgcctattctcggctcttctcctggggttggggggctgccttagcagccaaaggtcacttctcccaaactccttccctgctttccaggttgccagtccctgcactcttcctttctggccaaggatgatgtcagttctgctgctactagcctggagttgcagaagctactgtgcttcctctttgggtagcctatacctatacttatctcctcataatatcttcatg

SEQ ID NO: 360 - DNA, 2799 bp, Homo sapiens
ctcagggcagagggaggaaggacagcagaccagacagtcacagcagccttgacaaaacgttcctggaactcaagctcttctccacagaggaggacagagcagacagcagagaccatggagtctccctcggcccctccccacagatggtgcatcccctggcagaggctcctgctcacagcctcacttctaaccttctggaacccgcccaccactgccaagctcactattgaatccacgccgttcaatgtcgcagaggggaaggaggtgcttctacttgtccacaatctgccccagcatctttttggctacagctggtacaaaggtgaaagagtggatggcaaccgtcaaattataggatatgtaataggaactcaacaagctaccccagggcccgcatacagtggtcgagagataatataccccaatgcatccctgctgatccagaacatcatccagaatgacacaggattctacaccctacacgtcataaagtcagatcttgtgaatgaagaagcaactggccagttccgggtatacccggagctgcccaagccctccatctccagcaacaactccaaacccgtggaggacaaggatgctgtggccttcacctgtgaacctgagactcaggacgcaacctacctgtggtgggtaaacaatcagagcctcccggtcagtcccaggctgcagctgtccaatggcaacaggaccctcactctattcaatgtcacaagaaatgacacagcaagctacaaatgtgaaacccagaacccagtgagtgccaggcgcagtgattcagtcatcctgaatgtcctctatggcccggatgcccccaccatttcccctctaaacacatcttacagatcaggggaaaatctgaacctctcctgccacgcagcctctaacccacctgcacagtactcttggtttgtcaatgggactttccagcaatccacccaagagctctttatccccaacatcactgtgaataatagtggatcctatacgtgccaagcccataactcagacactggcctcaataggaccacagtcacgacgatcacagtctatgcagagccacccaaacccttcatcaccagcaacaactccaaccccgtggaggatgaggatgctgtagccttaacctgtgaacctgagattcagaacacaacctacctgtggtgggtaaataatcagagcctcccggtcagtcccaggctgcagctgtccaatgacaacaggaccctcactctactcagtgtcacaaggaatgatgtaggaccctatgagtgtggaatccagaacgaattaagtgttgaccacagcgacccagtcatcctgaatgtcctctatggcccagacgaccccaccatttccccctcatacacctattaccgtccaggggtgaacctcagcctctcctgccatgcagcctctaacccacctgcacagtattcttggctgattgatgggaacatccagcaacacacacaagagctctttatctccaacatcactgagaagaacagcggactctatacctgccaggccaataactcagccagtggccacagcaggactacagtcaagacaatcacagtctctgcggagctgcccaagccctccatctccagcaacaactccaaacccgtggaggacaaggatgctgtggccttcacctgtgaacctgaggctcagaacacaacctacctgtggtgggtaaatggtcagagcctcccagtcagtcccaggctgcagctgtccaatggcaacaggaccctcactctattcaatgtcacaagaaatgacgcaagagcctatgtatgtggaatccagaactcagtgagtgcaaaccgcagtgacccagtcaccctggatgtcctctatgggccggacacccccatcatttcccccccagactcgtcttacctttcgggagcgaacctcaacctctcctgccactcggcctctaacccatccccgcagtattcttggcgtatcaatgggataccgcagcaacacacacaagttctctttatcgccaaaatcacgccaaataataacgggacctatgcctgttttgtctctaacttggctactggccgcaataattccatagtcaagagcatcacagtctctgcatctggaacttctcctggtctctcagctggggccactgtcggcatcatgattggagtgctggttggggttgctctgatatagcagccctggtgtagtttcttcatttcaggaagactgacagttgttttgcttcttccttaaagcatttgcaacagctacagtctaaaattgcttctttaccaaggatatttacagaaaagactctgaccagagatcgagaccatcctagccaacatcgtgaaaccccatctctactaaaaatacaaaaatgagctgggcttggtggcgcgcacctgtagtcccagttactcgggaggctgaggcaggagaatcgcttgaacccgggaggtggagattgcagtgagcccagatcgcaccactgcactccagtctggcaacagagcaagactccatctcaaaaagaaaagaaaagaagactctgacctgtactcttgaatacaagtttctgataccactgcactgtctgagaatttccaaaactttaatgaactaactgacagcttcatgaaactgtccaccaagatcaagcagagaaaataattaatttcatgggactaaatgaactaatgaggattttgtggattctttgttttgtttcccagatttcaggaaacattttttctttcaagctatcta

SEQ ID NO: 361 - DNA, 2976 bp, Homo sapiens
ctcagggcagagggaggaaggacagcagaccagacagtcacagcagccttgacaaaacgttcctggaactcaagctcttctccacagaggaggacagagcagacagcagagaccatggagtctccctcggcccctccccacagatggtgcatcccctggcagaggctcctgctcacagcctcacttctaaccttctggaacccgcccaccactgccaagctcactattgaatccacgccgttcaatgtcgcagaggggaaggaggtgcttctacttgtccacaatctgccccagcatctttttggctacagctggtacaaaggtgaaagagtggatggcaaccgtcaaattataggatatgtaataggaactcaacaagctaccccagggcccgcatacagtggtcgagagataatataccccaatgcatccctgctgatccagaacatcatccagaatgacacaggattctacaccctacacgtcataaagtcagatcttgtgaatgaagaagcaactggccagttccgggtatacccggagctgcccaagccctccatctccagcaacaactccaaacccgtggaggacaaggatgctgtggccttcacctgtgaacctgagactcaggacgcaacctacctgtggtgggtaaacaatcagagcctcccggtcagtcccaggctgcagctgtccaatggcaacaggaccctcactctattcaatgtcacaagaaatgacacagcaagctacaaatgtgaaacccagaacccagtgagtgccaggcgcagtgattcagtcatcctgaatgtcctctatggcccggatgcccccaccatttcccctctaaacacatcttacagatcaggggaaaatctgaacctctcctgccacgcagcctctaacccacctgcacagtactcttggtttgtcaatgggactttccagcaatccacccaagagctctttatccccaacatcactgtgaataatagtggatcctatacgtgccaagcccataactcagacactggcctcaataggaccacagtcacgacgatcacagtctatgcagagccacccaaacccttcatcaccagcaacaactccaaccccgtggaggatgaggatgctgtagccttaacctgtgaacctgagattcagaacacaacctacctgtggtgggtaaataatcagagcctcccggtcagtcccaggctgcagctgtccaatgacaacaggaccctcactctactcagtgtcacaaggaatgatgtaggaccctatgagtgtggaatccagaacgaattaagtgttgaccacagcgacccagtcatcctgaatgtcctctatggcccagacgaccccaccatttccccctcatacacctattaccgtccaggggtgaacctcagcctctcctgccatgcagcctctaacccacctgcacagtattcttggctgattgatgggaacatccagcaacacacacaagagctctttatctccaacatcactgagaagaacagcggactctatacctgccaggccaataactcagccagtggccacagcaggactacagtcaagacaatcacagtctctgcggagctgcccaagccctccatctccagcaacaactccaaacccgtggaggacaaggatgctgtggccttcacctgtgaacctgaggctcagaacacaacctacctgtggtgggtaaatggtcagagcctcccagtcagtcccaggctgcagctgtccaatggcaacaggaccctcactctattcaatgtcacaagaaatgacgcaagagcctatgtatgtggaatccagaactcagtgagtgcaaaccgcagtgacccagtcaccctggatgtcctctatgggccggacacccccatcatttcccccccagactcgtcttacctttcgggagcgaacctcaacctctcctgccactcggcctctaacccatccccgcagtattcttggcgtatcaatgggataccgcagcaacacacacaagttctctttatcgccaaaatcacgccaaataataacgggacctatgcctgttttgtctctaacttggctactggccgcaataattccatagtcaagagcatcacagtctctgcatctggaacttctcctggtctctcagctggggccactgtcggcatcatgattggagtgctggttggggttgctctgatatagcagccctggtgtagtttcttcatttcaggaagactgacagttgttttgcttcttccttaaagcatttgcaacagctacagtctaaaattgcttctttaccaaggatatttacagaaaagactctgaccagagatcgagaccatcctagccaacatcgtgaaaccccatctctactaaaaatacaaaaatgagctgggcttggtggcgcgcacctgtagtcccagttactcgggaggctgaggcaggagaatcgcttgaacccgggaggtggagattgcagtgagcccagatcgcaccactgcactccagtctggcaacagagcaagactccatctcaaaaagaaaagaaaagaagactctgacctgtactcttgaatacaagtttctgataccactgcactgtctgagaatttccaaaactttaatgaactaactgacagcttcatgaaactgtccaccaagatcaagcagagaaaataattaatttcatgggactaaatgaactaatgaggattttgctgattctttaaatgtcttgtttcccagatttcaggaaactttttttcttttaagctatccacagcttacagcaatttgataaaatatacttttgtgaacaaaaattgagacatttacattttctccctatgtggtcgctccagacttgggaaactattcatgaatatttatattgtatggtaatatagttattgcacaagttcaataaaaatctgctctttgtatgacagaata

SEQ ID NO: 362 - DNA, 1547 bp, Homo sapiens
ctgaggattcctcacacatgtagtactcagagctctacggaaacccaggcacctcgacctcaagaggatcagcctggccagggtggcacaactcttccttccccgtgcacagcaggaaagctgccatcagctgagcaagtccaccaacagtttctgtgtcccacttcatctttaataagggggaaaaatgctcttttgggtgctaggcctcctaatcctctgtggttttctgtggactcgtaaaggaaaactaaagattgaagacatcactgataagtacatttttatcactggatgtgactcgggctttggaaacttggcagccagaacttttgataaaaagggatttcatgtaatcgctgcctgtctgactgaatcaggatcaacagctttaaaggcagaaacctcagagagacttcgtactgtgcttctggatgtgaccgacccagagaatgtcaagaggactgcccagtgggtgaagaaccaagttggggagaaaggtctctggggtctgatcaataatgctggtgttcccggcgtgctggctcccactgactggctgacactagaggactacagagaacctattgaagtgaacctgtttggactcatcagtgtgacactaaatatgcttcctttggtcaagaaagctcaagggagagttattaatgtctccagtgttggaggtcgccttgcaatcgttggagggggctatactccatccaaatatgcagtggaaggtttcaatgacagcttaagacgggacatgaaagcttttggtgtgcacgtctcatgcattgaaccaggattgttcaaaacaaacttggcagatccagtaaaggtaattgaaaaaaaactcgccatttgggagcagctgtctccagacatcaaacaacaatatggagaaggttacattgaaaaaagtctagacaaactgaaaggcaataaatcctatgtgaacatggacctctctccggtggtagagtgcatggaccacgctctaacaagtctcttccctaagactcattatgccgctggaaaagatgccaaaattttctggatacctctgtctcacatgccagcagctttgcaagactttttattgttgaaacagaaagcagagctggctaatcccaaggcagtgtgactcagctaaccacaaatgtctcctccaggctatgaaattggccgatttcaagaacacatctccttttcaaccccattccttatctgctccaacctggactcatttagatcgtgcttatttggattgcaaaagggagtcccaccatcgctggtggtatcccagggtccctgctcaagttttctttgaaaaggagggctggaatggtacatcacataggcaagtcctgccctgtatttaggctttgcctgcttggtgtgatgtaagggaaattgaaagacttgcccattcaaaatgatctttaccgtggcctgccccatgcttatggtccccagcatttacagtaacttgtgaatgttaagtatcatctcttatctaaatattaaaagataagtcaaacatt

SEQ ID NO: 363 - DNA, 1792 bp, Homo sapiens
gaagccactgtgcatgctctatcaccagcctcaccctcctggtcagccttacaagagtgacactggatatactccagaagttggacccaccacagcctgcacactggacttcttggcttttatgagctattcaagagatatttagtcatcacgttgtgtcacaatgggagtgactcacagagcaaggagagaacctgaggattcctcacacatgtagtactcagagctctacggaaacccaggcacctcgacctcaagaggatcagcctggccagggtggcacaactcttccttccccgtgcacagcaggaaagctgccatcagctgagcaagtccaccaacagtttctgtgtcccacttcatctttaataaggacaccatcttcttgtattatacaagaaaggagtgtacctatcacacacagggggaaaaatgctcttttgggtgctaggcctcctaatcctctgtggttttctgtggactcgtaaaggaaaactaaagattgaagacatcactgataagtacatttttatcactggatgtgactcgggctttggaaacttggcagccagaacttttgataaaaagggatttcatgtaatcgctgcctgtctgactgaatcaggatcaacagctttaaaggcagaaacctcagagagacttcgtactgtgcttctggatgtgaccgacccagagaatgtcaagaggactgcccagtgggtgaagaaccaagttggggagaaaggtctctggggtctgatcaataatgctggtgttcccggcgtgctggctcccactgactggctgacactagaggactacagagaacctattgaagtgaacctgtttggactcatcagtgtgacactaaatatgcttcctttggtcaagaaagctcaagggagagttattaatgtctccagtgttggaggtcgccttgcaatcgttggagggggctatactccatccaaatatgcagtggaaggtttcaatgacagcttaagacgggacatgaaagcttttggtgtgcacgtctcatgcattgaaccaggattgttcaaaacaaacttggcagatccagtaaaggtaattgaaaaaaaactcgccatttgggagcagctgtctccagacatcaaacaacaatatggagaaggttacattgaaaaaagtctagacaaactgaaaggcaataaatcctatgtgaacatggacctctctccggtggtagagtgcatggaccacgctctaacaagtctcttccctaagactcattatgccgctggaaaagatgccaaaattttctggatacctctgtctcacatgccagcagctttgcaagactttttattgttgaaacagaaagcagagctggctaatcccaaggcagtgtgactcagctaaccacaaatgtctcctccaggctatgaaattggccgatttcaagaacacatctccttttcaaccccattccttatctgctccaacctggactcatttagatcgtgcttatttggattgcaaaagggagtcccaccatcgctggtggtatcccagggtccctgctcaagttttctttgaaaaggagggctggaatggtacatcacataggcaagtcctgccctgtatttaggctttgcctgcttggtgtgatgtaagggaaattgaaagacttgcccattcaaaatgatctttaccgtggcctgccccatgcttatggtccccagcatttacagtaacttgtgaatgttaagtatcatctcttatctaaatattaaaagataagtcaaacatt

SEQ ID NO: 364 - DNA, 1297 bp, Homo sapiens
gacaccatcttcttgtattatacaagaaaggagtgtacctatcacacacagggggaaaaatgctcttttgggtgctaggcctcctaatcctctgtggttttctgtggactcgtaaaggaaaactaaagattgaagacatcactgataagtacatttttatcactggatgtgactcgggctttggaaacttggcagccagaacttttgataaaaagggatttcatgtaatcgctgcctgtctgactgaatcaggatcaacagctttaaaggcagaaacctcagagagacttcgtactgtgcttctggatgtgaccgacccagagaatgtcaagaggactgcccagtgggtgaagaaccaagttggggagaaaggtctctggggtctgatcaataatgctggtgttcccggcgtgctggctcccactgactggctgacactagaggactacagagaacctattgaagtgaacctgtttggactcatcagtgtgacactaaatatgcttcctacgggacatgaaagcttttggtgtgcacgtctcatgcattgaaccaggattgttcaaaacaaacttggcagatccagtaaaggtaattgaaaaaaaactcgccatttgggagcagctgtctccagacatcaaacaacaatatggagaaggttacattgaaaaaagtctagacaaactgaaaggcaataaatcctatgtgaacatggacctctctccggtggtagagtgcatggaccacgctctaacaagtctcttccctaagactcattatgccgctggaaaagatgccaaaattttctggatacctctgtctcacatgccagcagctttgcaagactttttattgttgaaacagaaagcagagctggctaatcccaaggcagtgtgactcagctaaccacaaatgtctcctccaggctatgaaattggccgatttcaagaacacatctccttttcaaccccattccttatctgctccaacctggactcatttagatcgtgcttatttggattgcaaaagggagtcccaccatcgctggtggtatcccagggtccctgctcaagttttctttgaaaaggagggctggaatggtacatcacataggcaagtcctgccctgtatttaggctttgcctgcttggtgtgatgtaagggaaattgaaagacttgcccattcaaaatgatctttaccgtggcctgccccatgcttatggtccccagcatttacagtaacttgtgaatgttaagtatcatctcttatctaaatattaaaagataagtcaaacatt

SEQ ID NO: 365 - DNA, 1670 bp, Homo sapiens
gaagccactgtgcatgctctatcaccagcctcaccctcctggtcagccttacaagagtgacactggatatactccagaagttggacccaccacagcctgcacactggacttcttggcttttatgagctattcaagagatatttagtcatcacgttgtgtcacaatgggagtgactcacagagcaaggagagaacctgaggattcctcacacatgtagtactcagagctctacggaaacccaggcacctcgacctcaagaggatcagcctggccagggtggcacaactcttccttccccgtgcacagcaggaaagctgccatcagctgagcaagtccaccaacagtttctgtgtcccacttcatctttaataaggacaccatcttcttgtattatacaagaaaggagtgtacctatcacacacagggggaaaaatgctcttttgggtgctaggcctcctaatcctctgtggttttctgtggactcgtaaaggaaaactaaagattgaagacatcactgataagtacatttttatcactggatgtgactcgggctttggaaacttggcagccagaacttttgataaaaagggatttcatgtaatcgctgcctgtctgactgaatcaggatcaacagctttaaaggcagaaacctcagagagacttcgtactgtgcttctggatgtgaccgacccagagaatgtcaagaggactgcccagtgggtgaagaaccaagttggggagaaaggtctctggggtctgatcaataatgctggtgttcccggcgtgctggctcccactgactggctgacactagaggactacagagaacctattgaagtgaacctgtttggactcatcagtgtgacactaaatatgcttcctacgggacatgaaagcttttggtgtgcacgtctcatgcattgaaccaggattgttcaaaacaaacttggcagatccagtaaaggtaattgaaaaaaaactcgccatttgggagcagctgtctccagacatcaaacaacaatatggagaaggttacattgaaaaaagtctagacaaactgaaaggcaataaatcctatgtgaacatggacctctctccggtggtagagtgcatggaccacgctctaacaagtctcttccctaagactcattatgccgctggaaaagatgccaaaattttctggatacctctgtctcacatgccagcagctttgcaagactttttattgttgaaacagaaagcagagctggctaatcccaaggcagtgtgactcagctaaccacaaatgtctcctccaggctatgaaattggccgatttcaagaacacatctccttttcaaccccattccttatctgctccaacctggactcatttagatcgtgcttatttggattgcaaaagggagtcccaccatcgctggtggtatcccagggtccctgctcaagttttctttgaaaaggagggctggaatggtacatcacataggcaagtcctgccctgtatttaggctttgcctgcttggtgtgatgtaagggaaattgaaagacttgcccattcaaaatgatctttaccgtggcctgccccatgcttatggtccccagcatttacagtaacttgtgaatgttaagtatcatctcttatctaaatattaaaagataagtcaaacatt

SEQ ID NO: 366 - DNA, 1269 bp, Homo sapiens
gaagccactgtgcatgctctatcaccagcctcaccctcctggtcagccttacaagagtgacactggatatactccagaagttggacccaccacagcctgcacactggacttcttggcttttatgagctattcaagagatatttagtcatcacgttgtgtcacaatgggagtgactcacagagcaaggagagaacctgaggattcctcacacatgtagtactcagagctctacggaaacccaggcacctcgacctcaagaggatcagcctggccagggtggcacaactcttccttccccgtgcacagcaggaaagctgccatcagctgagcaagtccaccaacagtttctgtgtcccacttcatctttaataaggacaccatcttcttgtattatacaagaaaggagtgtacctatcacacacagggggaaaaatgctcttttgggtgctaggcctcctaatcctctgtggttttctgtggactcgtaaaggaaaactaaagattgaagacatcactgataagtacatttttatcactggatgtgactcgggctttggaaacttggcagccagaacttttgataaaaagggatttcatgtaatcgctgcctgtctgactgaatcaggatcaacagctttaaaggcagaaacctcagagagacttcgtactgtgcttctggatgtgaccgacccagagaatgtcaagaggactgcccagtgggtgaagaaccaagttggggagaaaggtctctggggtctgatcaataatgctggtgttcccggcgtgctggctcccactgactggctgacactagaggactacagagaacctattgaagtgaacctgtttggactcatcagtgtgacactaaatatgcttcctttggtcaagaaagctcaagggagagttattaatgtctccagtgttggaggtcgccttgcaatcgttggagggggctatactccatccaaatatgcagtggaaggtttcaatgacagcttaagacgggacatgaaagcttttggtgtgcacgtctcatgcattgaacgtctagacaaactgaaaggcaataaatcctatgtgaacatggacctctctccggtggtagagtgcatggaccacgctctaacaagtctcttccctaagactcattatgccgctggaaaagatgccaaaattttctggatacctctgtctcacatgccagcagctttgcaagactttttattgttgaaacagaaagcagagctggctaatcccaaggcagtg

SEQ ID NO: 367 - DNA, 1390 bp, Homo sapiens
gggaaaaatgctcttttgggtgctaggcctcctaatcctctgtggttttctgtggactcgtaaaggaaaactaaagattgaagacatcactgataagtacatttttatcactggatgtgactcgggctttggaaacttggcagccagaacttttgataaaaagggatttcatgtaatcgctgcctgtctgactgaatcaggatcaacagctttaaaggcagaaacctcagagagacttcgtactgtgcttctggatgtgaccgacccagagaatgtcaagaggactgcccagtgggtgaagaaccaagttggggagaaaggtctctggggtctgatcaataatgctggtgttcccggcgtgctggctcccactgactggctgacactagaggactacagagaacctattgaagtgaacctgtttggactcatcagtgtgacactaaacatgcttcctcgacctcaagaggatcagcctggccagggtggcacaactcttccttccccgtgcacagcaggaaagctgccatcagttggagggggctatactccatccaaatatgcagtggaaggtttcaatgacagcttaagacgggacatgaaagcttttggtgtgcacgtctcatgcattgaaccaggattgttcaaaacaaacttggcagatccagtaaaggtaattgaaaaaaaactcgccatttgggagcagctgtctccagacatcaaacaacaatatggagaaggttacattgaaaaaagtctagacaaactgaaaggcaataaatcctatgtgaacatggacctctctccggtggtagagtgcatggaccacgctctaacaagtctcttccctaagactcattatgccgctggaaaagatgccaaaattttctggatacctctgtctcacatgccagcagctttgcaagactttttattgttgaaacagaaagcagagctggctaatcccaaggcagtgtgactcagctaaccacaaatgtctcctccaggctatgaaattggccgatttcaagaacacatctccttttcaaccccattccttatctgctccaacctggactcatttagatcgtgcttatttggattgcaaaagggagtcccaccatcgctggtggtatcccagggtccctgctcaagttttctttgaaaaggagggctggaatggtacatcacataggcaagtcctgccctgtatttaggctttgcctgcttggtgtgatgtaagggaaattgaaagacttgcccattcaaaatgatctttaccgtggcctgccccatgcttatggtccccagcatttacagtaacttgtgaatgttaagtatcatctcttatctaaatattaaaagataagtcaaacattaaaaaaaaaaa

SEQ ID NO: 368 - DNA, 4635 bp, Homo sapiens
aagaacacagccagcccgccctctcctgctgttgctgcagctctgacttgctttttcctgcctccttcctctcctctctcttcttgcttagcttcttgccttctgatactactcccaagatggaggctaatcactctgaacagctctcagcggaacgacagtcaacacctccaggtgacagttcatcattacccagtcacaatggcctggagaaggaagatggccaggattctccaaccccagtccaaccaccagagaaagaggcaagtgtgcaccccgatatctctgaagagctgaatcgacagctggaagacatcattaacacttatgggtctgctgccagcacagcagggaaagagggctctgccagggccagtgagcagcctgagaatgcagaatcacctgacaacgaggatggggactgtgaggaaacaactgaagaggctggaagagaacccgttgcttctggagagccacccactgtcaaagagcccgtcagcaataaggagcaaaaattggaaaagaaaatcctaaaaggattaggcaaaagccaacctgctaatgcaaaatctgaacaagttgcaaacaccggaagaaaagtttgattttttattcaagaagtatgctgaattgctggatgaacatcgtactgagcaaaagaagttaaagctcctccaaaagaaacaggtacaaattcaaaaagaaaaggaccagttacaaggtgaacacagcagagctatcctcgctcgaagcaaattggagagtctgtgccgggagctgcagagacacaacaagactctgaaggaagaggcgcttcagcgggcacgtgaggaagaagagaaaaggaaggaaatcacaagccatttccagagtaccctcacggacatccagggccagatcgagcagcagagtgagcgaaatatgaagctctgtcaggagaacacagagcttgcagaaaagctgaaaagcatcatcgatcagtatgagctcagagaggagcatctggacaaaatatttaaacacagagaactgcagcagaagctggtggatgcaaagcttgagcaggcccaagaaatgatgaaggaagcggaggagcgacacaaacgagaaaaggaatatttgctgaaccaggcagcagagtggaaacttcaggcgaaagtgctgaaggagcaagagacagtcctgcaggctcagctcactctctactcaggaaggtttgaagaattccagagcacactaactaaaagcaacgaggtgtttgccacgttcaaacaggaaatggacaaaacaactaagaaaatgaagaagctggaaaaggacacagccacatggaaagcccgatttgagaactgtaacaaagctctgttggacatgattgaagagaaagcactgagagctaaagaatatgagtgctttgtgatgaaaatcgggaggctagagaacctctgccgtgctttacaagaagagagaaacgaactccacaaaaaaatcagagacgcagaaatatctgaaaaggatgaccaaagtcagcacaactccgatgaagagccagagtcaaacgtctctgtggatcaagagattgacgcagaggaggttaatagtgtccaaaccgccgtgaaaaatctggccacagccttcatgataattcatcatccagagtcaaccccgcaccagtccaaagaaacccaacccgaaataggcagttctcaggagagtgctgacgccgctctcaaggagccagagcaaccccctctgatcccttcacgggattcagagagtcccctgcctcccctaactcctcaggctgaagccgaaggaggcagtgatgctgaacctccctccaaggccagtaattctcctgccgggttgggagcagaaacccaatgcgagggtctccctgttggagcacaggctgatcaggcgtcctggaagccagaggcagaagcttccggtcaggccccacaggctcccaccgaggcctccctacagaagatggaggcagatgtgcctgctccagcatgcgcagcagaagagcacgttgcagccatggtgcctgcatgcgagcccagtaggcagcccccacgagcagcagcagaggagctgccagtaggggcctcagctgggccccagccgcgcaacgtggctgacaccaatctggaaggcgtcgactaagcctcaccgtgccttcagaggcttcttcctgcctctttgcatattcagcataacagcttgtcttccgaaaaaggcattaagggctagagatgtcaaatggaagagacttaggatcaagacattttttaatgttaggcagaacacattcattcagactttgctatttgttgtcaatttatagctgatttgaaggttttctatttaacactggttgacagtataattttcccaaagggcaacaaaacatacagatagcaaatttatattccttttctgttaagataatacttaaatttgttaatcaccagtaagatttgatgtttaaagacttccactgcaatatataaatactgaaaatgtgatgttctgcttatttggatatatagtttaacaagttccatagtaatttatggatgcccaggttacatttaaactatacatatacataatatatacatacgtgtgtacttattatatgtatatatacacgtatgtatagatgtgtgaatatttgtttatatacatatatgcacgtatctatatgtatatataaatgcattattacacatacatttctctcaccccttaatgcatttttctcaatgcagaatatttagatgctaatcaaaaaaatgatctcttacttgcacttgagactatggttgactaatgctctataaatccgaagagagttcggactataagtatttaggctatcattatgttgggcaaaaataagtaacccaatggtagataaatgaattcaaccagttgatcaaatggcagaaaagcagttagactacaatctgtgcagacagcatggacacaaagatgaccacaaggggcccaaaacagaaaagagaaacacaagctcacctcttggagctgcttctcctacacttctcagcccattgctttgccaccccctcatgtgccagggcatcccattccaggcttcctgcaaggaaacggttggaagtgggaaaggggagctagggattgaggggttaagggacctcacactaagaaggggctgtgctttgatcccctgcctcttgcactaccaatgtctcaagacataatattcatctcttgctgtcagacccattctatattctaaaagcttctgctccttccttcccaatttctcctttgtagcaggaaattacacccagccctcatctcaattaatgctaaataaagctattgtttttccaaaacacaaatctacactgggtctcaatatcagtgatgaggcttacaaaccaacacgttttctgccatgaggatttctctttaggccagaagtacaaaacaaaaaaaccaatggattttaaccaaaatgatttgaaatataggtgaggattcaggagaaggcaaaagctagaaacacttggggttgtcaacatgagtattacattaacattgcttgatgagaacctctaatgatactgacaacataaattacctagggtaaaggatagctgcaacaatgaaacaggaaagaagagagggagagagaggaaagggaaggaagaaaggaaggagggagaagggaagaaagaaacaatgtctaacccaaccctatcttgaaagttgaactcaagtagaaaaatggatagaaacaaaattctctagtactcatccaggaaaccattcttcaatgttgcatgtggctgtttgccaaggcacacaaagtgcttgtaggcagcaaccatatgctacaagaattgtaaactgcatacagtttgtttgaagtagacagtgaggataataacaaagttgctaggcaggaaaaaaaatcaggaaaaaagcttgtcgctatttgagaatctgtatatttttaaaggcttaaaatattataaccacagggtatccagccaaattcaacattactgcaagtcttagagatttaaacattcatttgattcagagctaaatattcaccataatccaggagggtctccttccccactgcagaggcagaacgtccaagaatggagtaagattagtcatagtaaagtctcagtctgaatatttagcaagagaaacaggcagcagaggaacccaaaggcagtaaatcaaatattctaaaacccaaagttcattattttcatccaaaagactttcacagaaacacattactcacagccatgtatatcttggacagagtttcagatggaatgacttgtctgaaatttgtaaagcttaatataggttttgggggaattattttaatattcaaagaatgttttattatagtcctttgtgttaaaatttagccttactaattataacaataactcataaagttctaaattcagaaggaatgtctgttctttatcaagtgtatgtaactattttttagaaatgccatctactttctagaaacactaaagttattgttttctaagttaaataactataatttatatatctattaaaaaggtacttctcttccca

SEQ ID NO: 369 - DNA, 4752 bp, Homo sapiens
cagactgctgcctccatcagtgcctgtggcgtgtgtgtgtgtgtgtgtgtgtgcgcgcgcgtgcgtgcacgtgtgtatgtgtgtgtgtgtgtattgggtttctctctcccttgtaagaacacagccagcccgccctctcctgctgttgctgcagctctgacttgctttttcctgcctccttcctctcctctctcttcttgcttagcttcttgccttctgatactactcccaagatggaggctaatcactctgaacagctctcagcggaacgacagtcaacacctccaggtgacagttcatcattacccagtcacaatggcctggagaaggaagatggccaggattctccaaccccagtccaaccaccagagaaagaggcaagtgtgcaccccgatatctctgaagagctgaatcgacagctggaagacatcattaacacttatgggtctgctgccagcacagcagggaaagagggctctgccagggccagtgagcagcctgagaatgcagaatcacctgacaacgaggatggggactgtgaggaaacaactgaagaggctggaagagaacccgttgcttctggagagccacccactgtcaaagagcccgtcagcaataaggagcaaaaattggaaaagaaaatcctaaaaggattaggcaagtaaagccaacctgctaatgcaaaatctgaacaagttgcaaacaccggaagaaaagtttgattttttattcaagaagtatgctgaattgctggatgaacatcgtactgagcaaaagaagttaaagctcctccaaaagaaacaggtacaaattcaaaaagaaaaggaccagttacaaggtgaacacagcagagctatcctcgctcgaagcaaattggagagtctgtgccgggagctgcagagacacaacaagactctgaaggaagaggcgcttcagcgggcacgtgaggaagaagagaaaaggaaggaaatcacaagccatttccagagtaccctcacggacatccagggccagatcgagcagcagagtgagcgaaatatgaagctctgtcaggagaacacagagcttgcagaaaagctgaaaagcatcatcgatcagtatgagctcagagaggagcatctggacaaaatatttaaacacagagaactgcagcagaagctggtggatgcaaagcttgagcaggcccaagaaatgatgaaggaagcggaggagcgacacaaacgagaaaaggaatatttgctgaaccaggcagcagagtggaaacttcaggcgaaagtgctgaaggagcaagagacagtcctgcaggctcagctcactctctactcaggaaggtttgaagaattccagagcacactaactaaaagcaacgaggtgtttgccacgttcaaacaggaaatggacaaaacaactaagaaaatgaagaagctggaaaaggacacagccacatggaaagcccgatttgagaactgtaacaaagctctgttggacatgattgaagagaaagcactgagagctaaagaatatgagtgctttgtgatgaaaatcgggaggctagagaacctctgccgtgctttacaagaagagagaaacgaactccacaaaaaaatcagagacgcagaaatatctgaaaaggatgaccaaagtcagcacaactccgatgaagagccagagtcaaacgtctctgtggatcaagagattgacgcagaggaggttaatagtgtccaaaccgccgtgaaaaatctggccacagccttcatgataattcatcatccagagtcaaccccgcaccagtccaaagaaacccaacccgaaataggcagttctcaggagagtgctgacgccgctctcaaggagccagagcaaccccctctgatcccttcacgggattcagagagtcccctgcctcccctaactcctcaggctgaagccgaaggaggcagtgatgctgaacctccctccaaggccagtaattctcctgccgggttgggagcagaaacccaatgcgagggtctccctgttggagcacaggctgatcaggcgtcctggaagccagaggcagaagcttccggtcaggccccacaggctcccaccgaggcctccctacagaagatggaggcagatgtgcctgctccagcatgcgcagcagaagagcacgttgcagccatggtgcctgcatgcgagcccagtaggcagcccccacgagcagcagcagaggagctgccagtaggggcctcagctgggccccagccgcgcaacgtggctgacaccaatctggaaggcgtcgactaagcctcaccgtgccttcagaggcttcttcctgcctctttgcatattcagcataacagcttgtcttccgaaaaaggcattaagggctagagatgtcaaatggaagagacttaggatcaagacattttttaatgttaggcagaacacattcattcagactttgctatttgttgtcaatttatagctgatttgaaggttttctatttaacactggttgacagtataattttcccaaagggcaacaaaacatacagatagcaaatttatattccttttctgttaagataatacttaaatttgttaatcaccagtaagatttgatgtttaaagacttccactgcaatatataaatactgaaaatgtgatgttctgcttatttggatatatagtttaacaagttccatagtaatttatggatgcccaggttacatttaaactatacatatacataatatatacatacgtgtgtacttattatatgtatatatacacgtatgtatagatgtgtgaatatttgtttatatacatatatgcacgtatctatatgtatatataaatgcattattacacatacatttctctcaccccttaatgcatttttctcaatgcagaatatttagatgctaatcaaaaaaatgatctcttacttgcacttgagactatggttgactaatgctctataaatccgaagagagttcggactataagtatttaggctatcattatgttgggcaaaaataagtaacccaatggtagataaatgaattcaaccagttgatcaaatggcagaaaagcagttagactacaatctgtgcagacagcatggacacaaagatgaccacaaggggcccaaaacagaaaagagaaacacaagctcacctcttggagctgcttctcctacacttctcagcccattgctttgccaccccctcatgtgccagggcatcccattccaggcttcctgcaaggaaacggttggaagtgggaaaggggagctagggattgaggggttaagggacctcacactaagaaggggctgtgctttgatcccctgcctcttgcactaccaatgtctcaagacataatattcatctcttgctgtcagacccattctatattctaaaagcttctgctccttccttcccaatttctcctttgtagcaggaaattacacccagccctcatctcaattaatgctaaataaagctattgtttttccaaaacacaaatctacactgggtctcaatatcagtgatgaggcttacaaaccaacacgttttctgccatgaggatttctctttaggccagaagtacaaaacaaaaaaaccaatggattttaaccaaaatgatttgaaatataggtgaggattcaggagaaggcaaaagctagaaacacttggggttgtcaacatgagtattacattaacattgcttgatgagaacctctaatgatactgacaacataaattacctagggtaaaggatagctgcaacaatgaaacaggaaagaagagagggagagagaggaaagggaaggaagaaaggaaggagggagaagggaagaaagaaacaatgtctaacccaaccctatcttgaaagttgaactcaagtagaaaaatggatagaaacaaaattctctagtactcatccaggaaaccattcttcaatgttgcatgtggctgtttgccaaggcacacaaagtgcttgtaggcagcaaccatatgctacaagaattgtaaactgcatacagtttgtttgaagtagacagtgaggataataacaaagttgctaggcaggaaaaaaaatcaggaaaaaagcttgtcgctatttgagaatctgtatatttttaaaggcttaaaatattataaccacagggtatccagccaaattcaacattactgcaagtcttagagatttaaacattcatttgattcagagctaaatattcaccataatccaggagggtctccttccccactgcagaggcagaacgtccaagaatggagtaagattagtcatagtaaagtctcagtctgaatatttagcaagagaaacaggcagcagaggaacccaaaggcagtaaatcaaatattctaaaacccaaagttcattattttcatccaaaagactttcacagaaacacattactcacagccatgtatatcttggacagagtttcagatggaatgacttgtctgaaatttgtaaagcttaatataggttttgggggaattattttaatattcaaagaatgttttattatagtcctttgtgttaaaatttagccttactaattataacaataactcataaagttctaaattcagaaggaatgtctgttctttatcaagtgtatgtaactattttttagaaatgccatctactttctagaaacactaaagttattgttttctaagttaaataactataatttatatatctattaaaaaggtacttctcttccca

SEQ ID NO: 370 - DNA, 4154 bp, Homo sapiens
caaaagaagttaaagctcctccaaaagaaacaggtacaaattcaaaaagaaaaggaccagttacaaggtgaacacagcagagctatcctcgctcgaagcaaattggagagtctgtgccgggagctgcagagacacaacaagactctgaaggaagaggcgcttcagcgggcacgtgaggaagaagagaaaaggaaggaaatcacaagccatttccagagtaccctcacggacatccagggccagatcgagcagcagagtgagcgaaatatggagctctgtcaggagaacacagagcttgcagaaaagctgaaaagcatcatcgatcagtatgagctcagagaggagcatctggacaaaatatttaaacacagagaactgcagcagaagctggtggatgcaaagcttgagcaggcccaagaaatgatgaaggaagcggaggagcgacacaaacgagaaaaggaatatttgctgaaccaggcagcagagtggaaacttcaggcgaaaatgctgaaggagcaagagacagtcctgcaggctcagctcactctctactcaggaaggtttgaagaattccagagcacactaactaaaagcaacgaggtgtttgccacgttcaaacaggaaatggacaaaacaactaagaaaatgaagaagctggaaaaggacacagccacatggaaagcccgatttgagaactgtaacaaagctctgttggacatgattgaagagaaagcactgagagctaaagaatatgagtgctttgtgatgaaaatcgggaggctagagaacctctgccgtgctttacaagaagagagaaacgaactccacaaaaaaatcagagacgcagaaatatctgaaaaggatgaccaaagtcagcacaactccgatgaagagccagagtcaaacgtctctgtggatcaagagattgacgcagaggaggttaatagtgtccaaaccgccgtgaaaaatctggccacagccttcatgataattcatcatccagagtcaaccccgcaccagtccaaagaaacccaacccgaaataggcagttctcaggagagtgctgacgccgctctcaaagagccagagcaaccccctctgatcccttcacgggattcagagagtcccctgcctcccctaactcctcaggctgaagccgaaggaggcagtgatgctgaacctccctccaaggccagtaattctcctgccgggttgggagcagaaacccaatgcgagggtctccctgttggagcacaggctgatcagccgtcctggaagccagaggcagaagcttccggtcaggccccacaggctcccaccgaggcctccctacagaagatggaggcagatgtgcctgctccagcatgcgcagcagaagagcacgttgcagccatggtgcctgcatgcgagcccagtaggcagcccccacgagcagcagcagaggagctgccagtaggggcctcagctgggccccagccgcgcaacgtggctgacaccaatctggaaggcgtcgactaagcctcactgtgccttcagaggcttcttcctgcctctttgcgtattcagcataacagcttgtcttccgaaaaaggcattaagggctagagatgtcaaatggaagagacttaggatcaagacattttttaatgttaggcagaacacattcattcagactttgctatttgttgtcaatttatagctgatttgaaggttttctatttaacactggttgacagtataattttcccaaagggcaacaaaacatacagatagcaaatttatattccttttctgttaagataatacttaaatttgttaatcaccagtaagatttgatgtttaaagacttccactgcaatatataaatactgaaaatgtgatgttctgcttatttggatatatagtttaacaagttccatagtaatttatggatgcccaggttacatttaaactatacatatacataatatatacatacgtgtgtacttattatatgtatatatacacgtatgtatagatgtgtgaatatttgtttatatacatatatgcacgtatctatatgtatatataaatgcattattacacatacatttctctcaccccttaatgcatttttctcaatgcagaatatttagatgctaatcaaaaaaatgatctcttacttgcacttgggactatggttgactaatgctctataaatccgaagagagttcggactataagtatttaggctatcattatgttgggcaaaaataagtaacccaatggtagataaatgaattcaaccagttgatcaaatggcagaaaagcagttagactacaatctgtgcagacagcatggacacaaagatgaccacaaggggcccaaaacagaaaagagaaacacaagctcacctcttggagctgcttctcctacacttctcagcccattgctttgccaccccctcatgtgccagggcatcccattccaggcttcctgcaaggaaacggttggaagtgggaaaggggagctagggattgaggggttaagggacctcacactaagaaggggctgtgctttgatcccctgcctcttgcactaccaatgtctcaagacataatattcatctcttgctgtcagacccattctatattctaaaagcttctgctccttccttcccaatttctcctttgtagcaggaaattacacccagccctcatctcaattaatgctaaataaagctattgtttttccaaaacacaaatctacactgggtctcaatatcagtgatgaggcttacaaaccaacacgttttctgccatgaggatttctctttaggccagaagtacaaaacaaaaaaaccaatggattttaaccaaaatgatttgaaatataggtgaggattcaggagaaggcaaaagctagaaacacttggggttgtcaacatgagtattacattaacattgcttgatgagaacctctaatgatactgacaacataaattacctagggtaaaggatagttgcaacaatgaaacaggaaagaagagagggagagagaggaaagggaaggaagaaaggaaggagggagaagggaagaaagaaacaatgtctaacccaaccctatcttgaaagttgaactcaagtagaaaaatggatagaaacaaaattctctagtactcatccaggaaaccattcttcaatgttgcatgtggctgtttgccaaggcacacaaagtgcttgtaggcagcaaccatatgctacaagaattgtaaactgcatacagtttgtttgaagtagacagtgaggataataacaaagttgctaggcaggaaaaaaatcaggaaaaaagcttgtcgctatttgagaatctgtatatttttaaaggcttaaaatattataaccacagggtatccagccaaattcaacattactgcaagtcttagagatttaaacattcatttgattcagagctaaatattcaccataatccaggagggtctccttccccactgcagaggcagaacgtccaagaatggagtaagattagtcatagtaaagtctcagtctgaatatttagcaagagaaacaggcagcagaggaacccaaaggcagtaaatcaaatattctaaaacccaaagttcattatttccatccaaaagactttcacagaaacacattactcacagccatgtatatcttggacagagtttcagatggaatgacttgtctgaaatttgtaaagcttaatataggttttgggggaattattttaatattcaaagaatgttttattatagtcctttgtgttaaaatttagccttactaattataacaataactcataaagttctaaattcagaaggaatgtctgttctttatcaagtgtatgtaactattttttagaaatgccatctactttctagaaacactaaagttattgttttctaagttaaataactataatttatatatctattaaaaaggtacttctcttcccaaaaaaaaaaaaaaaaaaaaaaaaaaaaaaaaaaaaaaaaaaaaaaaaaaaaaaaaaaaaaaaaaaaaaaaaaaaaaaaaaaaaaaaaaaaaaaaaaaaaaaaaaaaaaaaaaaaaaaaaaaaaaaaaaaaaaaaaaaaaaaaaaaaaaaaaaagaaaaaaaaaaaaaaaaaaaa

SEQ ID NO: 371 - DNA, 9535 bp, Homo sapiens
ccagccgtgtgtgatgagtggccacaccttgcctcctcttcccgtcccaggcaccaacagcacagagcaggccagtgtacccagagccatggcagccacgctgggagccggcacgccccccaggccccaggccaggagcatagctggggtgtatgtggaggcctcgggccaggcccagagtgtctacgccgccatggagcagggcctcctgcctgctgggctcgggcaggctctgctagaggcccaggcagccactgggggcctggtggacctcgcccggggccagctgctccctgtgtccaaggccctgcagcagggtctggtggggctggagctgaaggagaagctgctggccgctgagcgtgccactacgggctatcctgacccctacggcggtgagaagctggccctctttcaggccatcgggaaggaggttgtggacagggccctggggcagagctggctggaggtccaactggccactgggggcctggtggaccccgcccagggagtgctcgtggcccctgagccagcctgccaccagggcctcctggaccgggagacatggcacaagctgtcagagcttgagcctggcacaggtgacctgcgcttcctcaaccccaacacgctggagcggctgacataccaccagctgctggaaaggtgtgtgcgtgcccccggctcggggctagccttgctgcccctcaagatcaccttccgctccatgggcggggcggtgagtgcagctgagctgctggaggtgggcatcctggacgagcaggctgtgcagggtctgcgggagggcaggctggccgcagtggacgtgagtgcacgtgccgaggtgcggcgctacctggagggtaccggcagcgtggccggggttgtcctgctgcccgaaggccacaagaagagctttttccaggctgccaccgagcacctgctcccaatgggcaccgcgctgccactcctagaggcccaggctgccacccacaccctggtggaccccatcacaggccagcggctgtgggtagacgaggcagtcagggcgggcctggtcagcccagagctccatgagcagctcctggtggccgagcaggccgtgacagggcaccacgaccccttcagtggctcccaaatcccccttttccaggccatgaagaaggggctagtggacaggccactagcactgcggctcttggatgcccagctggccacaggcgggctggtctgtccagcacgcaggctccggctgcccctggaggccgccctgcgctgcggctgcctggatgaagacactcagcggcagctctcgcaggctggcagcttctcagacggcacgcacggcggcctgcgctatgaacagctgctggccctctgtgtcaccgacccagagaccgggcttgccttcctgccactctcagggggaccccggggaggggagccccagggacccccattcatcaagtacagcactcggcaggccctgagcacggccacagccaccgtctctgtggggaagttccggggccggcccgtgtccctctgggagctgctcttctctgaggccatctcctcagagcagagggcgatgctggcccagcagtaccaggaagggaccctctccgtggagaagctggccgctgagctgagcgccaccctcgagcaggctgcagccactgccagggtcaccttttctgggctgagggacaccgtgacaccaggagagctgctgaaagccgagatcatcgaccaggacctgtacgagcggctggagcatggacaggccacagccaaggatgtgggcagcctggcctcggtgcagaggtacctgcagggtacgggctgcattgctggcctgctgctccctggctcccaggaacgcctgagcatctatgaggcccgatgcaaggggctcctccggcccggcactgccctcatccttctggaggcacaagctgccacaggcttcatcatcgacccaaaagcaaacaaggggcactccgttgaggaggcactgagggctgctgtcattgggcctgatgtgttcgcgaagctgctgtcggctgagcgcgctgtcactggctacactgacccctacaccgggcagcagatctccctcttccaggccatgcagaagggcctcatcgtccgggagcacggcatccgcctgctggaggcccagatcgccacgggcggcgtcatcgaccccgtgcacagccaccgcgtgcccgtggacgtggcctaccggcgcggctacttcgatcagatgctgaacttgatcctgttggacccttctgacgacaccaagggcttcttcgaccccaacacgcacgagaacctcacgtacctgcagcttctggagcgctgtgtgcgtgaccccgagacgggcctgtacctcctgccactcagcagcacgcagtccccgctggtggacagtgccacccagcaggccttccagaacctgctgctctccgtgaagtatggacggtttcaggggcagagggtctccgcgtgggagctgatcaactctgagtacttcagcgagggccgcaggaggcagctgctgcgtcgctaccggcagcgcgaggtcacgctggggcaggtggcaaagctgctggaggcggagacgcagagacaggcggacatcatgctgcccgcactgcggagccgggtcaccgtccaccagctcctggaggccggtatcattgaccagcagctgttggaccaagtgctggccgggacaatcagcccggaggccctcctactcatggacggcgtccgcaggtacctgtgcggcctgggagctgtgggcggtgtgcggctgctgccctctggccagcggctcagcctctaccaggccatgaggcagaagctgctggggcccagggtggccctggccctgctggaggcccaggcggccaccggaaccatcatggaccctcacagcccagagagcctctcggtggatgaggccgtgcgcaggggtgtggtggggccggagctgtatggcaggctgaagcgggctgagggtgccattgctggcttcagagaccccttctctgggaagcaggtgtctgtgttccaggccatgaagaaaggtctcatcccttgggagcaagctgcccgcctcctggaggctcaagtggccacaggagggatcattgaccccaccagccaccaccacctccccatgccagtggccattcagcgtggctatgttgaccaggagatggagacagccttgtccagctcctccgaaaccttccccacaccggacggccaggggcgcacgagctatgcccagctcctggaggagtgccccagggatgagacttctggccttcacctcctgcccctgccagaaagtgctcctgccctccccaccgaggagcaggtccagaggagcctgcaggccgtgccgggggccaaggatggcacatccctctgggacctgctcagctcctgccacttcaccgaggagcaacggaggggcctgctggaggacgtgcaggaggggaggaccactgtgccacagctgctagcctctgtgcagaggtgggtacaggagaccaagctcctggcccaggcccgcgtcatggtgcccggcccacggggtgaggtacccgctgtctggctgctggatgctggcatcatcacccaggagacccttgaggccctggctcagggcacgcagtcgcccgcccaggtcgccgagcagccggcggtgaaggcctgcctgtggggcacaggctgcgtggccggtgtgctgctacagccctctggggccaaggccagcatcgcccaggccgtgagggatggcctcctgcccacaggcctgggccagaggctgctggaagcccaggtggcatctggcttccttgttgaccccctgaacaaccagagactgtcagtggaggacgcggttaaggtcggcctggtgggcagggagctgagtgagcagctcgggcaggccgagagggcggcggccgggtacccagatccctactctagggcctccctctctctgtggcaggccatggagaaggggctcgtgccacagaacgagggcttgcccctcctgcaggtgcagctggccacagggggtgtggtggaccctgtccacggggtgcacctgccccaggcggcagcctgcagactcggccttctggacacacagacgagccaggtgctgactgcagttgacaaggacaacaagttcttctttgaccccagtgcgcgggaccaggtgacctaccagcagctcagggagcgctgcgtgtgcgactccgagaccggattgttgctgttgccactgccctcagacacagtgcttgaggtggacgaccacaccgcggtggctctgagggccatgaaggtgcccgtcagcacagggaggtttaaggggtgtagcgtgtcactctgggacctgctgctctccgaatacgttggcgctgacaagcggcgggagctggtggcactctgtcggtctgggagggctgcggccctgcggcaggtggtcagcgcagtcaccgccctggtcgaggctgcagagaggcagcccctgcaggccaccttcagagggctccggaagcaggtgtcagccagggacctgttcagggcgcagctgatcagcaggaagacgctggacgagctgagccaggggacaacgactgtgaaggaggtggcggagatggacagcgtgaagcggtccctggagggaggcaacttcattgccggggtccttatccagggcacccaggagaggatgagcatcccagaggccctgaggaggcacatcctgcggcctggcacagccctggtgctgctggaggcacaggcagctaccggcttcatcatcgaccccgtggagaaccggaagctgaccgtggaggaggcgttcaaagcaggaatgttcgggaaagaaacctacgtgaagctgctgtcggccgagcgcgccgtcaccggctacaccgacccctataccgggcagcagatctccctcttccaggccatgcagaaggacctcatcgtccgggagcacggcatccgcctgctggaggcccagatcgccacgggcggcatcatcgaccccgtgcacagccaccgcgtgcccgtggacgtggcctaccgctgcggctacttcgacgaggagatgaaccgcatcctggcggaccccagcgacgacaccaagggcttcttcgaccccaacacgcacgagaacctcacgtacctgcagcttctggagcgctgtgtggaggaccccgagacgggcctgtacctgctacaaatcataaagaaaggagaaaactacgtgtacatcaatgaggccacgagacacgtgttgcaatccagaactgcaaaaatgcgcgtggggaggtttgctgaccaggtggtctctttctgggacctgctgtcctctccatacttcacagaggacaggaagcgggagctcatccaggagtatggagcccagagtgggggcctggagaaattgctggaaatcatcaccacgacaattgaagaaacagagacgcaaaaccaaggcatcaaagtggcggccatcagaggggaggtgacagctgcagacctgttcaactccagggtcatcgatcagaagaccctgcacacacttcgtgtggggaggactgggggacaggcactcagcacgctggagtgtgtgaagccctatctggaaggcagcggctgcattgcgggggtcacggtgccctccaccagggaggtcatgagcctccatgaggccagcaggaaggagctcatccctgcagcatttgcgacttggctgctggaggcgcaggccgccaccgggttcctcctggacccctgcacccgccagaagctctctgtggatgaggctgtggatgtgggcctggtgaacgaggagctgcgggagaggctcctgaaggctgaaagagctgccacgggctacagggatccggccacaggagacacgatcccgctgttccaggccatgcagaagcagctcatcgagaaggcggaggcactgaggctgctggaggtgcaggtggccacggggggtgtcatcgacccacagcaccaccaccggctcccactggaaacagcctacagacggggctgtctgcacaaggacatctatgcgctcatttccgaccagaagcacatgaggaaacggtttgtggacccgaacacgcaagagaaggtctcgtaccgagagctgcaggagaggtgccgcccacaagaggacacgggctggctgctgttcccagtgaacaaggctgcacgggactccgagcacatcgatgacgagacgagaagggccctggaggcagagcaagtggaaatcacagtgggaaggttcagaggccagaaaccaacactgtgggcactactgaattccgaatacgtgacagaggagaagaagctccagctggtgaggatgtatagaacacacaccagacgggcactgcagacggtagcgcagctcatcttagagttgatcgagaagcaggaaaccagcaacaaacacctgtggttccaaggaattagacgacagatcacagcttctgaactcctcagctcagccataatcacggaggaaatgctccaggacctggaaacgggacggagcacgacgcaagagctcatggaggacgaccgcgtcaagcgctacctggagggcaccagctgcatcgcgggcgtcctggtgcccgccaaggaccagcccggccgccaggagaagatgagcatctaccaggccatgtggaagggcgtgctgcggcccggcacggccctggtgctgctggaggcgcaggcggccaccggcttcgtcatcgaccccgtgcgcaacctgaggctgtcggtggaggaggccgtggccgcgggcgtggtgggcggcgagatccaggagaagctgctgtcggccgagcgcgccgtcaccggctacaccgacccctacaccgggcagcagatctccctcttccaggccatgcagaaggacctcatcgtccgggagcacggcatccgcctgctggaggcccagatcgccacgggcggcgtcatcgaccccgtgcacagccaccgcgtgcccgtggacgtggcctaccggcgcggctacttcgacgaggagatgaaccgtgtcctggccgaccccagcgacgacaccaagggcttcttcgaccccaacacgcacgagaacctcacgtacgtgcagctgctgcgccgctgcgtgcccgacccggacaccgggctctacatgctgcagctggcaggccggggctccgccgtgcaccagctgagcgaggagctgcgctgtgccctgcgcgacgcccgcgtgacgccaggctcgggcgccctccagggccagagcgtctccgtctgggagctcctcttctaccgcgaggtgtccgaggaccggcgccaggacctgctgagcagataccgggcgggcacgctgaccgtggaggagctgggcgccaccctcacctcgctgctggcccaggcccaggcccaggcccgggccgaggccgaggccgggagcccgcgcccagacccccgggaggccctgcgtgcggccaccatggaggtcaaggtgggccgcctccgggggcgcgcggtgcccgtgtgggacgtgctggcgtccggctacgtgagcagggccgcccgggaggagctgctggccgagtttggctcggggaccctggacttgcccgcgctgacccgccggctgaccgccatcatcgaggaggccgaggaggcccccggggcccggccgcagctccaggacgcctggcgcggcccgcgggagccagggccagccgggcgaggggacggcgactcggggcgctcccagcgagagggccagggggagggcgagacccaggaggccgccgccgccgcccgccgccaggagcagaccctgcgtgatgccaccatggaggtgcagcgcgggcagttccaggggcggccggtctccgtgtgggacgtcctcttctcctcgtacctgagcgaggcccaccgagacgagctcctggcccagcacgcggccggcgccctgggcctgcccgacctcgtcgccgtcctcacccgggtcatcgaggagaccgaggagcggctcagcaaggtgtccttccgcggcctgaggcgccaggtgtccgcctccgagctgcacacgtccgggatcctgggccccgagaccctgcgggacctggcccagggcactaagacgctgcaggaggtgacggagatggactcggtcaagcgctacctggagggcaccagctgcatcgcgggcgtcctggtgcccgccaaggaccagcccggccgccaggagaagatgagcatctaccaggccatgtggaagggcgtgctgcggcccggcacggccctggtgctgctggaggcgcaggcggccaccggcttcgtcatcgaccccgtgcgcaacctgaggctgtcggtggaggaggccgtggccgcgggcgtggtgggcggcgagatccaggagaagctgctgtcggccgagcgcgccgtcaccggctacaccgacccctacaccgggcagcagatctccctcttccaggccatgcagaaggacctcatcgtccgggagcacggcatccgcctgctggaggcccagatcgccacgggcggcgtcatcgaccccgtgcacagccaccgcgtgcccgtggacgtggcctaccggcgcggctacttcgacgaggagatgaaccgcgtcctggccgaccccagcgacgacaccaagggcttcttcgaccccaacacgcacgagaacctcacgtacctgcagcttctgcagagggccaccctggaccctgagacggggctcctatttctttctctctctctacagtgactgggcttcctccgtgcagttttctgcaactctggagaagtggaggcatacttgtgtgtctgggttgtttttttttttttttttttttttgtcattctttaattttgttgttttacccattcgttatctgtggaaaacgttttaagttgtcatgtgacagaaacttttcctttgtccatcgaggtgtttcataagttttttggtgtgttttctgggtcgtctatgtgtcatatggttttacttttctctcctttttcgttttcagaacatttttctgtctgttttggattcactgcttccattttacagaatgtcactctttagactctcagtccatcatgccatcgggtactcttgttgcagtgtaatttttattacatgcggttatttccctaacgatgtgctattcacgttcatcttcaaactcattttccatcagccagtgtctactatttagtgccctggctctatttcggtcctcctccccgggctttccctggctgctgtgctggccaaaagcatgggctttattctctccattggctgctgctccaccttagaggtgtgacctcactagcgttgactgagcgagtctgttgtggagaagaactttttgtagtaatttactaggaaaaattctgaacaagtaaaatatgaaggaaactc

SEQ ID NO: 372 - DNA, 15534 bp, Homo sapiens
ccagccgtgtgtgatgagtggccacaccttgcctcctcttcccgtcccaggcaccaacagcacagagcaggccagtgtacccagagccatggcagccacgctgggagccggcacgccccccaggccccaggccaggagcatagctggggtgtatgtggaggcctcgggccaggcccagagtgtctacgccgccatggagcagggcctcctgcctgctgggctcgggcaggctctgctagaggcccaggcagccactgggggcctggtggacctcgcccggggccagctgctccctgtgtccaaggccctgcagcagggtctggtggggctggagctgaaggagaagctgctggccgctgagcgtgccactacgggctatcctgacccctacggcggtgagaagctggccctctttcaggccatcgggaaggaggttgtggacagggccctggggcagagctggctggaggtccaactggccactgggggcctggtggaccccgcccagggagtgctcgtggcccctgagccagcctgccaccagggcctcctggaccgggagacatggcacaagctgtcagagcttgagcctggcacaggtgacctgcgcttcctcaaccccaacacgctggagcggctgacataccaccagctgctggaaaggtgtgtgcgtgcccccgggtcggggctagccttgctgcccctcaagatcaccttccgctccatgggcggggcggtgagtgcagctgagctgctggaggtgggcatcctggacgagcaggctgtgcagggtctgcgggagggcaggctggccgcagtggacgtgagtgcacgtgccgaggtgcggcgctacctggagggtaccggcagcgtggccggggttgtcctgctgcccgaaggccacaagaagagctttttccaggctgccaccgagcacctgctcccaatgggcaccgcgctgccactcctagaggcccaggctgccacccacaccctggtggaccccatcacaggccagcggctgtgggtagacgaggcagtcagggcgggcctggtcagcccagagctccatgagcagctcctggtggctgagcaggccgtgacagggcaccacgaccccttcagtggctcccaaatcccccttttccaggccatgaagaaggggctagtggacaggccactagcactgcggctcttggatgcccagctggccacaggcgggctggtctgtccagcacgcaggctccggctgcccctggaggccgccctgcgctgcggctgcctggatgaagacactcagcggcagctctcgcaggctggcagcttctcagacggcacgcacggcggcctgcgctatgaacagctgctggccctctgtgtcaccgacccagagaccgggcttgccttcctgccactctcagggggaccccggggaggggagccccagggacccccattcatcaagtacagcactcggcaggccctgagcacggccacagccaccgtctctgtggggaagttccggggccggcccgtgtccctctgggagctgctcttctctgaggccatctcctcagagcagagggcgatgctggcccagcagtaccaggaagggaccctctccgtggagaagctggccgctgagctgagcgccacccttgagcaggctgcagccactgccagggtcaccttttctgggctgagggacaccgtgacaccaggagagctgctgaaagccgagatcatcgaccaggacctgtacgagcggttggagcatggacaggccacagccaaggatgtgggcagcctggcctcggcgcagaggtacctgcagggtacgggctgcattgctggcctgctgctccctggctcccaggaacgcctgagcatctatgaggcccgatgcaaggggctcctccggcccggcactgccctcatccttctggaggcacaagctgccacaggcttcatcatcgacccaaaagcaaacaaggggcactccgttgaggaggcactgagggctgctgtcattgggcctgatgtgttcgcgaagctgctgtcggctgagcgcgctgtcactggctacactgacccctacaccgggcagcagatctccctcttccaggccatgcagaagggcctcatcgtccgggagcacggcatccgcctgctggaggcccagatcgccacgggcggcgtcatcgaccccgtgcacagccaccgcgtgcccgtggacgtggcctaccggcgcggctacttcgatcagatgctgaacttgatcctgttggacccttctgacgacaccaagggcttcttcgaccccaacacgcacgagaacctcacgtacctgcagcttctggagcgctgtgtgcgtgaccccgagacgggcctgtacctcctgccactcagcagcacgcagtccccgctggtggacagtgccacccagcaggccttccagaacctgctgctctccgtgaagtatggacggtttcaggggcagagggtctccgcgtgggagctgatcaactctgagtacttcagcgagggccgcaggaggcagctgctgcgtcgctaccggcagcgcgaggtcacgctggggcaggtggcaaagctgctggaggcggagacgcagagacaggcggacatcatgctgcccgcactgcggagccgggtcaccgtccaccagctcctggaggccggtatcattgaccagcagctgttggaccaagtgctggccgggacaatcagcccggaggccctcctactcatggacggcgtccgcaggtacctgtgcggcctgggagctgtgggcggtgtgcggctgctgccctctggccagcggctcagcctctaccaggccatgaggcagaagctgctggggcccagggtggccctggccctgctggaggcccaggcggccaccggaaccatcatggaccctcacagcccagagagcctctcggtggatgaggccgtgcgcaggggtgtggtggggccggagctgtatggcaggctgaagcgggctgagggtgccattgctggcttcagagaccccttctctgggaagcaggtgtctgtgttccaggccatgaagaaaggtctcatcccttgggagcaagctgcccgcctcctggaggctcaagtggccacaggagggatcattgaccccaccagccaccaccacctccccatgccagtggccattcagcgtggctatgttgaccaggagatggagacagccttgtccagctcctccgagaccttccccacaccggacggccaggggcgcacgagctatgcccagctcctggaggagtgccccagggatgagacttctggccttcacctcctgcccctgccagaaagtgctcctgccctccccaccgaggagcaggtccagaggagcctgcaggccgtgccgggggccaaggatggcacatccctctgggacctgctcagctcctgccacttcaccgaggagcaacggaggggcctgctggaggacgtgcaggaggggaggaccactgtgccacagctgctagcctctgtgcagaggtgggtacaggagaccaagcttctggcccaggcccgcgtcatggtgcccggcccacggggtgaggtacccgctgtctggctgctggatgctggcatcatcacccaggagacccttgaggccctggctcagggcacgcagtcgcccgcccaggtcgccgagcagccggcggtgaaggcctgcctgtggggcacaggctgcgtggccggtgtgctgctacagccctctggggccaaggccagcatcgcccaggccgtgagggatggcctcctgcccacaggcctgggccagaggctgctggaagcccaggtggcatctggcttccttgttgaccccctgaacaaccagagactgtcagtggaggacgcggttaaggtcggcctggtgggcagggagctgagtgagcagctcgggcaggccgagagggcggcggccgggtacccagatccctactctagggcctccctctctctgtggcaggccatggagaaggggctcgtgccacagaacgagggcttgcccctcctgcaggtgcagctggccacagggggtgtggtggaccctgtccacggggtgcacctgccccaggcggcagcctgcagactcggccttctggacacacagacgagccaggtgctgactgcagttgacaaggacaacaagttcttctttgaccccagtgcgcgggaccaggtgacctaccagcagctcagggagcgctgcgtgtgcgactccgagaccggattgttgctgttgccactgccttcagacacagtgcttgaggtggacgaccacaccgcggtggctctgagggccatgaaggtgcccgtcagcacagggaggtttaaggggtgtagcgtgtcactctgggacctgctgctctccgaatacgttggcgctgacaagcggcgggagctggtggcactctgtcggtctgggagggctgcggccctgcggcaggtggtcagcgcagtcaccgccctggtcgaggctgcagagaggcagcccctgcaggccaccttcagagggctccggaagcaggtgtcagccagggacctgttcagggcgcagctgatcagcaggaagacgctggacgagctgagccaggggacaacgactgtgaaggaggtggcggagatggacagcgtgaagcggtccctggagggaggcaacttcattgccggggtccttatccagggcacccaggagaggatgagcatcccagaggccctgaggaggcacatcctgcggcctggcacagccctggtgctgctggaggcacaggcagctaccggcttcatcatcgaccccgcggagaaccggaagctgaccgtggaggaggcgttcaaagcaggaatgttcgggaaagaaacctacgtgaagctgctgtcggccgagcgcgccgtcaccggctacaccgacccctataccgggcagcagatctccctcttccaggccatgcagaaggacctcatcgtccgggagcacggcatccgcctgctggaggcccagatcgccacgggcggcatcatcgaccccgtgcacagccaccgcgtgcccgtggacgtggcctaccgctgcggctacttcgacgaggagatgaaccgcatcctggcggaccccagcgacgacaccaagggcttcttcgaccccaacacgcacgagaacctcacgtacctgcagcttctggagcgctgtgtggaggaccccgagacgggcctgtacctgctacaaatcataaagaaaggagaaaactacgtgtacatcaatgaggccacgagacacgtgttgcaatccagaactgcaaaaatgcgcgtggggaggtttgctgaccaggtggtctctttctgggacctgctgtcctctccatacttcacagaggacaggaagcgggagctcatccaggagtatggagcccagagtgggggcctggagaaattgctggaaatcatcaccacgacaattgaagaaacagagacgcaaaaccaaggcatcaaagtggcggccatcagaggggaggtgacagctgcagacctgttcaactccagggtcatcgatcagaagaccctgcacacacttcgtgtggggaggactgggggacaggcactcagcacgctggagtgtgtgaagccctatctggaaggcagcgactgcattgcgggggtcacggtgccctccaccagggaggtcatgagcctccatgaggccagcaggaaggagctcatccctgcagcatttgcgacttggctgctggaggcgcaggccgccaccgggttcctcctggacccctgcacccgccagaagctctctgtggatgaggctgtggatgtgggcctggtgaacgaggagctgcgggagaggctcctgaaggctgaaagagctgccacgggctacagggatccggccacaggagacacgatcccgctgttccaggccatgcagaagcagctcatcgagaaggcggaggcactgaggctgctggaggtgcaggtggccacggggggtgtcatcgacccacagcaccaccaccggctcccactggaaacagcctacagacggggctgtctgcacaaggacatctatgcgctcatttccgaccagaagcacatgaggaaacggtttgtggacccgaacacgcaagagaaggtctcgtaccgagagctgcaggagaggtgccgcccacaagaggacacgggctgggtgctgttcccagtgaacaaggctgcacgggactccgagcacatcgatgacgagacgagaagggccctggaggcagagcaagtggaaatcacagtgggaaggttcagaggccagaaaccaacactgtgggcactactgaattccgaatacgtgacagaggagaagaagctccagctggtgaggatgtatagaacacacaccagacgggcactgcagacggtagcgcagctcatcttagagttgatcgagaagcaggaaaccagcaacaaacacctgtggttccaaggaattagacgacagatcacagcttctgaactcctcagctcagccataatcacggaggaaatgctccaggacctggaaacgggacggagcacgacgcaagagctcatggaggacgaccgcgtcaagcgctacctggagggcaccagctgcatcgcgggcgtcctggtgcccgccaaggaccagcccggccgccaggagaagatgagcatctaccaggccatgtggaagggcgtgctgcggcccggcacggccctggtgctgctggaggcgcaggcggccaccggcttcgtcatcgaccccgtgcgcaacctgaggctgtcggtggaggagcccgtgcccgcgggcgtggtgggcagcgagatccaggagaagctgctgtcggccgagcgcgccgtcaccggctacaccgacccctacaccgggcagcagatctccctcttccaggccatgcagaaggacctcatcgtccgggagcacggcatccgcctgctggaggcccagatcgccacgggcggcgtcatcgaccccgtgcacagccaccgcgtgcccgtggacgtggcctaccggcgcggctacttcgacgaggagatgaaccgtgtcctggccgaccccagcgacgacaccaagggtttcttcgaccccaacacgcacgagaacctcacgtacgtgcagctgctgcgccgctgcgtgcccgacccggacaccgggctctacatgctgcagctggcaggccggggctccgccgtgcaccagctgagcgaggagctgcgctgtgccctgcgcgacgcccgcgtgacgccaggctcgggcgccctccagggccagagcgtctccgtctgggagctcctcttctaccgcgaggtgtccgaggaccggcgccaggacctgctgagcagataccgggcgggcacgctgaccgtggaggagctgggcgccaccctcacctcgctgctggcccaggcccaggcccaggcccgggccgaggccgaggccgggagcccgcgcccagacccccgggaggccctgcgtgcggccaccatggaggtcaaggtgggccgcctccgggggcgcgcggtgcccgtgtgggacgtgctggcgtccggctacgtgagcagggccgcccgggaggagctgctggccgagtttggctcggggaccctggacttgcccgcgctgacccgccggctgaccgccatcatcgaggaggccgaggaagcccccggggcccggccgcagctccaggacgccaggcgcggcccgcgggagccagggccagccgggcgaggggacggcgactcggggcgctcccagcgagagggccagggggagggcgagacccaggaggccgccgccgccgccgccgccgcccgccgccaggagcagaccctgcgtgatgccaccatggaggtgcagcgcgggcagttccaggggcggccggtctccgtgtgggacgtcctcttctcctcgtacctgagcgaggcccgccgagacgagctcctggcccagcacgcggccggcgccctgggcctgcccgacctcgtcgccgtcctcacccgggtcatcgaggagacggaggagcggctcagcaaggtgtccttccgcggcctgaggcgccaggtgtccgcctccgagctgcacacgtccgggatcctgggccccgagaccctgcgggacctggcccagggcactaagacgctgcaggaggtgacggagatggactcggtcaagcgctacctggagggcaccagctgcatcgcgggcgtcctggtgcccgccaaggaccagcccggccgccaggagaagatgagcatctaccaggccatgtggaagggcgtgctgcggcccggcacggccctggtgctgctggaggcgcaggcggccaccggcttcgtcatcgaccccgtgcgcaacctgaggctgtcggtggaggaggccgtggccgcgggcgtggtgggcggcgagatccaggagaagctgctgtcggccgagcgcgccgtcaccggctacaccgacccctacaccgggcagcagatctccctcttccaggccatgcagaaggacctcatcgtccgggagcacggcatccgcctgctggaggcccagatcgccacgggcggcgtcatcgaccccgtgcacagccaccgcgtgcccgtggacgtggcctaccggcgcggctacttcgacgaggagatgaaccgtgtcctggccgaccccagcgacgacaccaagggtttcttcgaccccaacacgcacgagaacctcacgtacgtgcagctgctgcgccgctgcgtgcccgacccggacaccgggctctacatgctgcagctggcaggccggggctccgccgtgcaccagctgagcgaggagctgcgctgtgccctgcgcgacgcccgcgtgacgccaggctcgggcgccctccagggccagagcgtctccgtctgggagctcctcttctaccgcgaggtgtccgaggaccggcgccaggacctgctgagcagataccgggcgggcacgctgaccgtggaggagctgggcgccaccctcacctcgctgctggcccaggcccaggcccaggcccgggccgaggccgaggccgggagcccgcgcccagacccccgggaggccctgcgtgcggccaccatggaggtcaaggtgggccgcctccgggggcgcgcggtgcccgtgtgggacgtgctggcgtccggctacgtgagcggggccgcccgggaggagctgctggccgagtttggctcggggaccctggacttgcccgcgctgacccgccggctgaccgccatcatcgaggaggccgaggaggcccccggggcccggccgcagctccaggacgcctggcgcggcccgcgggagccagggccagccgggcgaggggacggcgactcggggcgctcccagcgagagggccagggggagggcgagacccaggaggccgccgccgccgccgccgccgcccgccgccaggagcagaccctgcgtgatgccaccatggaggtgcagcgcgggcagttccaggggcggccggtctccgtgtgggacgtcctcttctcctcgtacctgagcgaggcccgccgagacgagctcctggcccagcacgcggccggcgccctgggcctgcccgacctcgtcgccgtcctcacccgggtcatcgaggagacggaggagcggctcagcaaggtgtccttccgcggcctgaggcgccaggtgtccgcctccgagctgcacacgtccgggatcctgggccccgagaccctgcgggacctggcccagggcactaagacgctgcaggaggtgacggagatggactcggtcaagcgctacctggagggcaccagctgcatcgcgggcgtcctggtgcccgccaaggaccagcccggccgccaggagaagatgagcatctaccaggccatgtggaagggcgtgctgcggcccggcacggccctggtgctgctggaggcgcaggcggccaccggcttcgtcatcgaccccgtgcgcaacctgaggctgtcggtggaggaggccgtggccgcgggcgtggtgggcggcgagatccaggagaagctgctgtcggccgagcgcgccgtcaccggctacaccgacccctacaccgggcagcagatctccctcttccaggccatgcagaaggacctcatcgtccgggagcacggcatccgcctgctggaggcccagatcgccacgggcggcgtcatcgaccccgtgcacagccaccgcgtgcccgtggacgtggcctaccggcgcggctacttcgacgaggagatgaaccgtgtcctggccgaccccagcgacgacaccaagggtttcttcgaccccaacacgcacgagaacctcacgtacgtgcagctgctgcgccgctgcgtgcccgacccggacaccgggctctacatgctgcagctggcaggccggggctccgccgtgcaccagctgagcgaggagctgcgctgtgccctgcgcgacgcccgcgtgacgccaggctcgggcgccctccagggccagagcgtctccgtctgggagctcctcttctaccgcgaggtgtccgaggaccggcgccaggacctgctgagcagataccgggcgggcacgctgaccgtggaggagctgggcgccaccctcacctcgctgctggcccaggcccaggcccaggcccgggccgaggccgaggccgggagcccgcgcccagacccccgggaggccctgcgtgcggccaccatggaggtcaaggtgggccgcctccgggggcgcgcggtgcccgtgtgggacgtgctggcgtccggctacgtgagcggggccgcccgggaggagctgctggccgagtttggctcggggaccctggacttgcccgcgctgacccgccggctgaccgccatcatcgaggaggccgaggaggcccccggggcccggccgcagctccaggacgcctggcgcggcccgcgggagccagggccagccgggcgaggggacggcgactcggggcgctcccagcgagagggccagggggagggcgagacccaggaggccgccgccgccgccgccgccgcccgccgccaggagcagaccctgcgtgatgccaccatggaggtgcagcgcgggcagttccaggggcggccggtctccgtgtgggacgtcctcttctcctcgtacctgagcgaggcccgccgagacgagctcctggcccagcacgcggccggcgccctgggcctgcccgacctcgtcgccgtcctcacccgggtcatcgaggagacggaggagcggctcagcaaggtgtccttccgcggcctgaggcgccaggtgtccgcctccgagctgcacacgtccgggatcctgggccccgagaccctgcgggacctggcccagggcactaagacgctgcaggaggtgacggagatggactcggtcaagcgctacctggagggcaccagctgcatcgcgggcgtcctggtgcccgccaaggaccagcccggccgccaggagaagatgagcatctaccaggccatgtggaagggcgtgctgcggcccggcacggccctggtgctgctggaggcgcaggcggccaccggcttcgtcatcgaccccgtgcgcaacctgaggctgtcggtggaggaggccgtggccgcgggcgtggtgggcggcgagatccaggagaagctgctgtcggccgagcgcgccgtcaccggctacaccgacccctacaccgggcagcagatctccctcttccaggccatgcagaaggacctcatcgtccgggagcacggcatccgcctgctggaggcccagatcgccacgggcggcgtcatcgaccccgtgcacagccaccgcgtgcccgtggacgtggcctaccggcgcggctacttcgacgaggagatgaaccgtgtcctggccgaccccagcgacgacaccaagggcttcttcgaccccaacacgcacgagaacctcacgtacgtgcagctgctgcgccgctgcgtgcccgacccggacaccgggctctacatgctgcagctggcaggccggggctccgccgtgcaccagctgagcgaggagctgcgctgtgccctgcgcgacgcccgcgtgacgccaggctcgggcgccctccagggccagagcgtctccgtctgggagctcctcttctaccgcgaggtgtccgaggaccggcgccaggacctgctgagcagataccgggcgagcacgctgaccgtggaggagctgggcgccaccctcacctcgctgctggcccaggcccaggcccaggcccgggccgaggccgaggccgggagcccgcgcccagacccccgggaggccctgcgtgcggccaccatggaggtcaaggtgggccgcctccgggggcgcgcggtgcccgtgtgggacgtgctggcgtccggctacgtgagcagggccgcccgggaggagctgctggccgagtttggctcggggaccctggacttgcccgcgctgacccgccggctgaccgccatcatcgaggaggccgaggaggcccccggggcccggccgcagctccaggacgcctggcgcggcccgcgggagccagggccagccgggcgaggggacggcgactcggggcgctcccagcgagagggccagggggagggcgagacccaggaggccgccgccgccaccgccgccgcccgccgccaggagcagaccctgcgtgatgccaccatggaggtgcagcgcgggcagttccaggggcggccggtctccgtgtgggacgtcctcttctcctcgtacctgagcgaggcccgccgagacgagctcctggcccagcacgcggccggcgccctgggcctgcccgacctcgtcgccgtcctcacccgggtcatcgaggagacggaggagcggctcagcaaggtgtccttccgcggcctgaggcgccaggtgtccgcctccgagctgcacacgtccgggatcctgggccccgagaccctgcgggacctggcccagggcactaagacgctgcaggaggtgacggagatggactcggtcaagcgctacctggagggcaccagctgcatcgcgggcgtcctggtgcccgccaaggaccagcccggccgccaggagaagatgagcatctaccaggccatgtggaagggcgtgctgcggcccggcacggccctggtgctgctggaggcgcaggcggccaccggcttcgtcatcgaccccgtgcgcaacctgaggctgtcggtggaggaggccgtggccgcgggcgtggtgggcggcgagatccaggagaagctgctgtcggccgagcgcgccgtcaccggctacaccgacccctacaccgggcagcagatctccctcttccaggccatgcagaaggacctcatcgtccgggagcacggcatccgcctgctggaggcccagatcgccacgggcggcgtcatcgaccccgtgcacagccaccgcgtgcccgtggacgtggcctaccggcgcggctacttcgacgaggagatgaaccgtgtcctggccgaccccagcgacgacaccaagggcttcttcgaccccaacacgcacgagaacctcacgtacgtgcagctgctgcgccgctgcgtgcccgacccggacaccgggctctacatgctgcagctggcaggccggggctccgccgtgcaccagctgagcgaggagctgcgctgtgccctgcgcgacgcccgcgtgacgccaggctcgggcgccctccagggccagagcgtctccgtctgggagctcctcttctaccgcgaggtgtccgaggaccggcgccaggacctgctgagcagataccgggcgggcacgctgaccgtggaggagctgggcgccaccctcacctcgctgctggcccaggcccaggcccaggcccgggccgaggccgaggccgggagcccgcgcccagacccccgggaggccctgcgtgcggccaccatggaggtcaaggtgggccgcctccgggggcgcgcggtgcccgtgtgggacgtgctggcgtccggctacgtgagcggggccgcccgggaggagctgctggccgagtttggctcggggaccctggacttgcccgcgctgacccgccggctgaccgccatcatcgaggaggccgaggaggcccccggggcccggccgcagctccaggacgcctggcgcggcccgcgggagccagggccagccgggcgaggggacggcgactcggggcgctcccagcgagagggccagggggagggcgagacccaggaggccgccgccgccgccgccgccgcccgccgccaggagcagaccctgcgtgatgccaccatggaggtgcagcgcgggcagttccaggggcggccggtctccgtgtgggacgtcctcttctcctcgtacctgagcgaggcccgccgagacgagctcctggcccagcacgcggccggcgccctgggcctgcccgacctcgtcgccgtcctcacccgggtcatcgaggagacggaggagcggctcagcaaggtgtccttccgcggcctgaggcgccaggtgtccgcctccgagctgcacacgtccgggatcctgggccccgagaccctgcgggacctggcccagggcactaagacgctgcaggaggtgacggagatggactcggtcaagcgctacctggagggcaccagctgcatcgcgggcgtcctggtgcccgccaaggaccagcccggccgccaggagaagatgagcatctaccaggccatgtggaagggcgtgctgcggcccggcacggccctggtgctgctggaggcgcaggcggccaccggcttcgtcatcgaccccgtgcgcaacctgaggctgtcggtggaggaggccgtggccgcgggcgtggtgggcggcgagatccaggagaagctgctgtcggccgagcgcgccgtcaccggctacaccgacccctacaccgggcagcagatctccctcttccaggccatgcagaaggacctcatcgtccgggagcacggcatccgcctgctggaggcccagatcgccacgggcggcgtcatcgaccccgtgcacagccaccgcgtgcccgtggacgtggcctaccggcgcggctacttcgacgaggagatgaaccgcgtcctggccgaccccagcgacgacaccaagggcttcttcgaccccaacacgcacgagaacctcacgtacctgcagcttctgcagagggccaccctggaccctgagacggggctcctatttctttctctctctctacagtgactgggcttcctccgtgcagttttctgcaactctggagaagttgaggcatacttgtgtgtctgggttgtttttttttttttttgtcattctttaattttgttgttttacccattcgttatctgtggaaaacgttttaagttgtcatgtgacagaaacttttcctttgtccatcgaggtgtttcataagttttttggtgtgttttctgggtcgtctatgtgtcatatggttttacttttctcccggaatt

SEQ ID NO: 373 - DNA, 5191 bp, Homo sapiens
ggcgagtgcgtcgagctcgccgcggactcaagatggcggcgtgtggacgtgtacggaggatgttccgcttgtcggcggcgctgcatctgctgctgctattcgcggccggggccgagaaactccccggccagggcgtccacagccagggccagggtcccggggccaactttgtgtccttcgtagggcaggccggaggcggcggcccggcgggtcagcagctgccccagctgcctcagtcatcgcagcttcagcagcaacagcagcagcagcaacagcaacagcagcctcagccgccgcagccgcctttcccggcgggtgggcctccggcccggcggggaggagcgggggctggtgggggctggaagctggcggaggaagagtcctgcagggaggacgtgacccgcgtgtgccctaagcacacctggagcaacaacctggcggtgctcgagtgcctgcaggatgtgagggagcctgaaaatgaaatttcttcagactgcaatcatttgttgtggaattataagctgaacctaactacagatcccaaatttgaatctgtggccagagaggtttgcaaatctactataacagagattaaagaatgtgctgatgaaccggttggaaaaggttacatggtttcctgcttggtggatcaccgaggcaacatcactgagtatcagtgtcaccagtacattaccaagatgacggccatcatttttagtgattaccgtttaatctgtggcttcatggatgactgcaaaaatgacatcaacattctgaaatgtggcagtattcggcttggagaaaaggatgcacattcacaaggtgaggtggtatcatgcttggagaaaggcctggtgaaagaagcagaagaaagagaacccaagattcaagtttctgaactctgcaagaaagccattctccgggtggctgagctgtcatcggatgactttcacttagaccggcatttatattttgcttgccgagatgatcgggagcgtttttgtgaaaatacacaagctggtgagggcagagtgtataagtgcctctttaaccataaatttgaagaatccatgagtgaaaagtgtcgagaagcacttacaacccgccaaaagctgattgcccaggattataaagtcagttattcattggccaaatcctgtaaaagtgacttgaagaaataccggtgcaatgtggaaaaccttccgcgatcgcgtgaagccaggctctcctacttgttaatgtgcctggagtcagctgtacacagagggcgacaagtcagcagtgagtgccagggggagatgctggattaccgacgcatgttgatggaagacttttctctgagccctgagatcatcctaagctgtcggggggagattgaacaccattgttccggattacatcgaaaagggcggaccctacactgtctgatgaaagtagttcgaggggagaaggggaaccttggaatgaactgccagcaggcgcttcaaacactgattcaggagactgaccctggtgcagattaccgcattgatcgagctttgaatgaagcttgtgaatctgtaatccagacagcctgcaaacatataagatctggagacccaatgatcttgtcgtgcctgatggaacatttatacacagagaagatggtagaagactgtgaacaccgtctcttagagctgcagtatttcatctcccgggattggaagctggaccctgtcctgtaccgcaagtgccagggagacgcttctcgtctttgccacacccacggttggaatgagaccagtgaatttatgcctcagggagctgtgttctcttgtttatacagacacgcctaccgcactgaggaacagggaaggaggctctcacgggagtgccgagctgaagtccaaaggatcctacaccagcgtgccatggatgtcaagctggatcctgccctccaggataagtgcctgattgatctgggaaaatggtgcagtgagaaaacagagactggacaggagctggagtgccttcaggaccatctggatgacttggtggtggagtgtagagatatagttggcaacctcactgagttagaatcagaggatattcaaatagaagccttgctgatgagagcctgtgagcccataattcagaacttctgccacgatgtggcagataaccagatagactctggggacctgatggagtgtctgatacagaacaaacaccagaaggacatgaacgagaagtgtgccatcggagttacccacttccagctggtgcagatgaaggattttcggttttcttacaagtttaaaatggcctgcaaggaggacgtgttgaagctttgcccaaacataaaaaagaaggtggacgtggtgatctgcctgagcacgaccgtgcgcaatgacactctgcaggaagccaaggagcacagggtgtccctgaagtgccgcaggcagctccgtgtggaggagctggagatgacggaggacatccgcttggagccagatctatacgaagcctgcaagagtgacatcaaaaacttctgttccgctgtgcaatatggcaacgctcagattatcgaatgtctgaaagaaaacaagaagcagctaagcacccgctgccaccaaaaagtatttaagctgcaggagacagagatgatggacccagagctagactacaccctcatgagggtctgcaagcagatgataaagaggttctgtccggaagcagattctaaaaccatgttgcagtgcttgaagcaaaataaaaacagtgaattgatggatcccaaatgcaaacagatgataaccaagcgccagatcacccagaacacagattaccgcttaaaccccatgttaagaaaagcctgtaaagctgacattcctaaattctgtcacggtatcctgactaaggccaaggatgattcagaattagaaggacaagtcatctcttgcctgaagctgagatatgctgaccagcgcctgtcttcagactgtgaagaccagatccgaatcattatccaggagtccgccctggactaccgcctggatcctcagctccagctgcactgctcagacgagatctccagtctatgtgctgaagaagcagcagcccaagagcagacaggtcaggtggaggagtgcctcaaggtcaacctgctcaagatcaaaacagaattgtgtaaaaaggaagtgctaaacatgctgaaggaaagcaaagcagacatctttgttgacccggtacttcatactgcttgtgccctggacattaaacaccactgcgcagccatcacccctggccgcgggcgtcaaatgtcctgtctcatggaagcactggaggataagcgggtgaggttacagcccgagtgcaaaaagcgcctcaatgaccggattgagatgtggagttacgcagcaaaggtggccccagcagatggcttctctgatcttgccatgcaagtaatgacgtctccatctaagaactacattctctctgtgatcagtgggagcatctgtatattgttcctgattggcctgatgtgtggacggatcaccaagcgagtgacacgagagctcaaggacaggtagagccaccttgaccaccaaaggaactacctatccagtgcccagtttgtacagccctcttgtatagcatccccactcacctcgctcttctcagaagtgacaccaaccccgtgttagagcattagcagatgtccactgcgttgtcccatccagcctccactcgtgtccatggtgtcctcctcctcctcaccgtgcagcagcagcagctggtcgctggggttactgcctttgtttggcaaacttgggtttacctgcctgtagacaagtctctctcataccaacagaacttccggtacttccagaaccaactcacctgacctgcaactcaaaggcttttttaagaaaaccaccaaaaaaaaaaatttttttaaagaaaaaaatgtatatagtaacgcatctcctccaggcttgatttgggcaatggggttatgtctttcatatgactgtgtaaaacaaagacaggacttggaggggaagcacaccacccagtgtgccatgactgaggtgtctcgttcatctctcagaagcaccttggggcctcgccagggccgtggtcttcaccgaggcgtgggtgggcagccgttccccaggctgtgtggggtcctgctttcttctgctgagacagtgacgctttccagtttccaccctaatcagccactgctggtcacagccccacagccatgggtatttctgtggtctcctcgcttcattgaagcaaagcatgagccttcctagacaagggcagctggggaggggaagggaccggaagtttgtgaagttgaacagtccatccatctgcactgagaggctggatcctgagtcccggggcagcaggatcccaggaaccttcctcctccagggcagcacaggactcagccatgtctggaccggccctgctgaggctacagtcactctggaagctctgcgcttcatcaggaggcaggactgtggcgggaggggtccttgaagatgggtgtggggagcagtgggtcaggaagtgggagccagaggtttgactcactttgctttatttttcaggctacaatacaggtcagagacaatggcttataaaggtttagtgtggtctcaggatgtgacaggcagtccagcctgacctttctgcacactccagacaaacttcccagacaagctcctttgtgcctctacgtggagagggtgtggaaagttatcacattaaaagatggaggatttgctctgttttttttctttctgtccatttgctgcgtgtacccactctagtaggcattggctaaatgttgtattttggcgattcatcaacctttgcagaatatgggctttatagaagcaatattcttggccatcccgcctcattcctccagtgtggagatgacaagtctgggtgtgagagggaggggtccgggcatcatggttcagcgtggcactcctttggttgagtttggggcatgagatcacagtggctgcacaagagagcagtgtgtacagtaggagagacatttatgtaatatatattttattaacctgttagatgtccacaaagtattataaatcacgtgcctaaaactgtccatgtagaccaaggcctgccctcggcgccccccactcttgcctctgctctgcac

SEQ ID NO: 374 - DNA, 5108 bp, Homo sapiens
ggcgagtgcgtcgagctcgccgcggactcaagatggcggcgtgtggacgtgtacggaggatgttccgcttgtcggcggcgctgcatctgctgctgctattcgcggccggggccgagaaactccccggccagggcgtccacagccagggccagggtcccggggccaactttgtgtccttcgtagggcaggccggaggcggcggcccggcgggtcagcagctgccccagctgcctcagtcatcgcagcttcagcagcaacagcagcagcagcaacagcaacagcagcctcagccgccgcagccgcctttcccggcgggtgggcctccggcccggcggggaggagcgggggctggtgggggctggaagctggcggaggaagagtcctgcagggaggacgtgacccgcgtgtgccctaagcacacctggagcaacaacctggcggtgctcgagtgcctgcaggatgtgagggagcctgaaaatgaaatttcttcagactgcaatcatttgttgtggaattataagctgaacctaactacagatcccaaatttgaatctgtggccagagaggtttgcaaatctactataacagagattaaagaatgtgctgatgaaccggttggaaaaggttacatggtttcctgcttggtggatcaccgaggcaacatcactgagtatcagtgtcaccagtacattaccaagatgacggccatcatttttagtgattaccgtttaatctgtggcttcatggatgactgcaaaaatgacatcaacattctgaaatgtggcagtattcggcttggagaaaaggatgcacattcacaaggtgaggtggtatcatgcttggagaaaggcctggtgaaagaagcagaagaaagagaacccaagattcaagtttctgaactctgcaagaaagccattctccgggtggctgagctgtcatcggatgactttcacttagaccggcatttatattttgcttgccgagatgatcgggagcgtttttgtgaaaatacacaagctggtgagggcagagtgtataagtgcctctttaaccataaatttgaagaatccatgagtgaaaagtgtcgagaagcacttacaacccgccaaaagctgattgcccaggattataaagtcagttattcattggccaaatcctgtaaaagtgacttgaagaaataccggtgcaatgtggaaaaccttccgcgatcgcgtgaagccaggctctcctacttgttaatgtgcctggagtcagctgtacacagagggcgacaagtcagcagtgagtgccagggggagatgctggattaccgacgcatgttgatggaagacttttctctgagccctgagatcatcctaagctgtcggggggagattgaacaccattgttccggattacatcgaaaagggcggaccctacactgtctgatgaaagtagttcgaggggagaaggggaaccttggaatgaactgccagcaggcgcttcaaacactgattcaggagactgaccctggtgcagattaccgcattgatcgagctttgaatgaagcttgtgaatctgtaatccagacagcctgcaaacatataagatctggagacccaatgatcttgtcgtgcctgatggaacatttatacacagagaagatggtagaagactgtgaacaccgtctcttagagctgcagtatttcatctcccgggattggaagctggaccctgtcctgtaccgcaagtgccagggagacgcttctcgtctttgccacacccacggttggaatgagaccagtgaatttatgcctcagggagctgtgttctcttgtttatacagacacgcctaccgcactgaggaacagggaaggaggctctcacgggagtgccgagctgaagtccaaaggatcctacaccagcgtgccatggatgtcaagctggatcctgccctccaggataagtgcctgattgatctgggaaaatggtgcagtgagaaaacagagactggacaggagctggagtgccttcaggaccatctggatgacttggtggtggagtgtagagatatagttggcaacctcactgagttagaatcagaggatattcaaatagaagccttgctgatgagagcctgtgagcccataattcagaacttctgccacgatgtggcagataaccagatagactctggggacctgatggagtgtctgatacagaacaaacaccagaaggacatgaacgagaagtgtgccatcggagttacccacttccagctggtgcagatgaaggattttcggttttcttacaagtttaaaatggcctgcaaggaggacgtgttgaagctttgcccaaacataaaaaagaaggtggacgtggtgatctgcctgagcacgaccgtgcgcaatgacactctgcaggaagccaaggagcacagggtgtccctgaagtgccgcaggcagctccgtgtggaggagctggagatgacggaggacatccgcttggagccagatctatacgaagcctgcaagagtgacatcaaaaacttctgttccgctgtgcaatatggcaacgctcagattatcgaatgtctgaaagaaaacaagaagcagctaagcacccgctgccaccaaaaagtatttaagctgcaggagacagagatgatggacccagagctagactacaccctcatgagggtctgcaagcagatgataaagaggttctgtccggaagcagattctaaaaccatgttgcagtgcttgaagcaaaataaaaacagtgaattgatggatcccaaatgcaaacagatgataaccaagcgccagatcacccagaacacagattaccgcttaaaccccatgttaagaaaagcctgtaaagctgacattcctaaattctgtcacggtatcctgactaaggccaaggatgattcagaattagaaggacaagtcatctcttgcctgaagctgagatatgctgaccagcgcctgtcttcagactgtgaagaccagatccgaatcattatccaggagtccgccctggactaccgcctggatcctcagctccagctgcactgctcagacgagatctccagtctatgtgctgaagaagcagcagcccaagagcagacaggtcaggtggaggagtgcctcaaggtcaacctgctcaagatcaaaacagaattgtgtaaaaaggaagtgctaaacatgctgaaggaaagcaaagcagacatctttgttgacccggtacttcatactgcttgtgccctggacattaaacaccactgcgcagccatcacccctggccgcgggcgtcaaatgtcctgtctcatggaagcactggaggataagcgggtgaggttacagcccgagtgcaaaaagcgcctcaatgaccggattgagatgtggagttacgcagcaaaggtggccccagcagatggcttctctgatcttgccatgcaagtaatgacgtctccatctaagaactacattctctctgtgatcagtgggagcatctgtatattgttcctgattggcctgatgtgtggacggatcaccaagcgagtgacacgagagctcaaggacaggtagagccaccttgaccaccaaaggaactacctatccagtgcccagtttgtacagccctcttgtatagcatccccactcacctcgctcttctcagaagtgacaccaaccccgtgttagagcattagcagatgtccactgcgttgtcccatccagcctccactcgtgtccatggtgtcctcctcctcctcaccgtgcagcagcagcagctggtcgctggggttactgcctttgtttggcaaacttgggtttacctgcctgtagacaagtctctctcataccaacagaacttccggtacttccagaaccaactcacctgacctgcaactcaaaggcttttttaagaaaaccaccaaaaaaaaaaatttttttaaagaaaaaaatgtatatagtaacgcatctcctccaggcttgatttgggcaatggggttatgtctttcatatgactgtgtaaaacaaagacaggacttggaggggaagcacaccacccagtgtgccatgactgaggtgtctcgttcatctctcagaagcaccttggggcctcgccagggccgtggtcttcaccgaggcgtgggtgggcagccgttccccaggctgtccatgggtatttctgtggtctcctcgcttcattgaagcaaagcatgagccttcctagacaagggcagctggggaggggaagggaccggaagtttgtgaagttgaacagtccatccatctgcactgagaggctggatcctgagtcccggggcagcaggatcccaggaaccttcctcctccagggcagcacaggactcagccatgtctggaccggccctgctgaggctacagtcactctggaagctctgcgcttcatcaggaggcaggactgtggcgggaggggtccttgaagatgggtgtggggagcagtgggtcaggaagtgggagccagaggtttgactcactttgctttatttttcaggctacaatacaggtcagagacaatggcttataaaggtttagtgtggtctcaggatgtgacaggcagtccagcctgacctttctgcacactccagacaaacttcccagacaagctcctttgtgcctctacgtggagagggtgtggaaagttatcacattaaaagatggaggatttgctctgttttttttctttctgtccatttgctgcgtgtacccactctagtaggcattggctaaatgttgtattttggcgattcatcaacctttgcagaatatgggctttatagaagcaatattcttggccatcccgcctcattcctccagtgtggagatgacaagtctgggtgtgagagggaggggtccgggcatcatggttcagcgtggcactcctttggttgagtttggggcatgagatcacagtggctgcacaagagagcagtgtgtacagtaggagagacatttatgtaatatatattttattaacctgttagatgtccacaaagtattataaatcacgtgcctaaaactgtccatgtagaccaaggcctgccctcggcgccccccactcttgcctctgctctgcac

SEQ ID NO: 375 - DNA, 3901 bp, Homo sapiens
aagatggcggcgtgtggacgtgtacggaggatgttccgcttgtcggcggcgctgcatctgctgctgctattcgcggccggggccgagaaactccccggccatggcgtccacagccagggccagggtcccggggccaactttgtgtccttcgtagggcaggccggaggcggcggcccggcgggtcagcagctgccccagctgcttcagtcatcgcagcttcagcagcaacagcagcagcagcaacagcaacagcagcttcagccgccgcagccgcctttcccggcgggtgggcctccggcccggcggggaggagcgggggctggtgggggctggaagctggcggaggaagagtcctgcagggaggacgtgacccgcgtgtgccctaagcacacctggagcaacaacctggcggtgctcgagtgcctgcaggatgtgagggagcctgaaaatgaaatttcttcagactgcaatcatttgttgtggaattataagctgaacctaactacagatcccaaatttgaatctgtggccagagaggtttgcaaatctactataacagagattaaagaatgtgctgatgaaccggttggaaaaggttacatggtttcctgcttagtggatcaccgaggcaacatcactgagtatcagtgtcaccagtacattaccaagatgacggccatcatttttagtgattaccgtttaatctgtggcttcatggatgactgcaaaaatgacatcaacattctgaaatgtggcagtattcggcttggagaaaaggatgcacattcacaaggtgaggtggtatcatgcttggagaaaggcctggtgaaagaagcagaagaaagagaacccaagattcaagtttctgaactctgcaagaaagccattctccgggtggctgagctgtcatcggatgactttcacttagaccggcatttatattttgcttgccgagatgatcgggagcgtttttgtgaaaatacacaagctggtgagggcagagtgtataagtgcctctttaaccataaatttgaagaatccatgagtgaaaagtgtcgagaagcacttacaacccgccaaaagctgattgcccaggattataaagtcagttattcattggccaaatcctgtaaaagtgacttgaagaaataccggtgcaatgtggaaaaccttccgcgatcgcgtgaagccaggctctcctacttgttaatgtgcctggagtcagctgtacacagagggcgacaagtcagcagtgagtgccagggggagatgctggattaccgacgcatgttgatggaagacttttctctgagccctgagatcatcctaagctgtcggggggagattgaacaccattgttccggattacatcgaaaagggcggaccctacactgtctgatgaaagtagttcgaggggagaaggggaaccttggaatgaactgccagcaggcgcttcaaacactgattcaggagactgaccctggtgcagattaccgcattgatcgagctttgaatgaagcttgtgaatctgtaatccagacagcctgcaaacatataagatctggagacccaatgatcttgtcgtgcctgatggaacatttatacacagagaagatggtagaagactgtgaacaccgtctcttagagctgcagtatttcatctcccgggattggaagctggaccctgtcctgtaccgcaagtgccagggagacgcttctcgtctttgccacacccacggttggaatgagaccagtgaatttatgcctcagggagctgtgttctcttgtttatacagacacgcctaccgcactgaggaacagggaaggaggctctcacgggagtgccgagctgaagtccaaaggatcctacaccagcgtgccatggatgtcaagctggatcctgccctccaggataagtgcctgattgatctgggaaaatggtgcagtgagaaaacagagactggacaggagctggagtgccttcaggaccatctggatgacttggtggtggagtgtagagatatagttggcaacctcactgagttagaatcagaggatattcaaatagaagccttgctgatgagagcctgtgagcccataattcagaacttctgccacgatgtggcagataaccagatagactctggggacctgatggagtgtctgatacagaacaaacaccagaaggacatgaacgagaagtgtgccatcggagttacccacttccagctggtgcagatgaaggattttcggttttcttacaagtttaaaatggcctgcaaggaggacgtgttgaagctttgcccaaacataaaaaagaaggtggacgtggtgatctgcctgagcacgaccgtgcgcaatgacactctgcaggaagccaaggagcacagggtgtccctgaagtgccgcaggcagctccgtgtggaggagctggagatgacggaggacatccgcttggagccagatctatacgaagcctgcaagagtgacatcaaaaacttctgttccgctgtgcaatatggcaacgctcagattatcgaatgtctgaaagaaaacaagaagcagctaagcacccgctgccaccaaaaagtatttaagctgcaggagacagagatgatggacccagagctagactacaccctcatgagggtctgcaagcagatgataaagaggttctgtccggaagcagattctaaaaccatgttgcagtgcttgaagcaaaataaaaacagtgaattgatggatcccaaatgcaaacagatgataaccaagcgccagatcacccagaacacagattaccgcttaaaccccatgttaagaaaagcctgtaaagctgacattcctaaattctgtcacggtatcctgactaaggccaaggatgattcagaattagaaggacaagtcatctcttgcctgaagctgagatatgctgaccagcgcctgtcttcagactgtgaagaccagatccgaatcattatccaggagtccgccctggactaccgcctggatcctcagctccagctgcactgctcagacgagatctccagtctatgtgctgaagaagcagcagcccaagagcagacaggtcaggtggaggagtgcctcaaggtcaacctgctcaagatcaaaacagaattgtgtaaaaaggaagtgctaaacatgctgaaggaaagcaaagcagacatctttgttgacccggtacttcatactgcttgtgccctggacattaaacaccactgcgcagccatcacccctggccgcgggcgtcaaatgtcctgtctcatggaagcactggaggataagcgggtgaggttacagcccgagtgcaaaaagcgcctcaatgaccggattgagatgtggagttacgcagcaaaggtggccccagcagatggcttctctgatcttgccatgcaagtaatgacgtctccatctaagaactacattctctctgtgatcagtgggagcatctgtatattgttcctgattggcctgatgtgtggacggatcaccaagcgagtgacacgagagctcaaggacaggtagagccaccttgaccaccaaaggaactacctatccagtgcccagtttgtacagccctcttgtatagcatccccactcacctcgctcttctcagaagtgacaccaaccccgtgttagagcattagcagatgtccactgcgttgtcccatccagcctccactcgtgtccatggtgtcctcctcctcctcaccgtgcagcagcagcagctggtcgctggggttactgcctttgtttggcaaacttgggtttacctgcctgtagacaagtctctctcataccaacagaacttccggtacttccagaaccaactcacctgacctgcaactcaaaggcttttttaagaaaaccaccaaaaaaaaaa

SEQ ID NO: 376 - DNA, 1694 bp, Homo sapiens
ccttgctgggctattggcgcccccagggctgcagctcgcccggcctccgcagtgccaggtcgacccccagcgcctacacccacgcgggttcagacctgccgagcgcccgccgccgcgggaggggcttgaggccggggcggggcggggccggggcggggcgtccccctcgtaggctccgggccgcgcattctcagcgctgggagccgccgcccccgcagctgccgccgccgccagggcccggactcggacgcgtggtagccccaggatgggtgagttcaacgagaagaagacaacatgtggcaccgtttgcctcaagtacctgctgtttacctacaattgctgcttctggctggctggcctggctgtcatggcagtgggcatctggacgctggccctcaagagtgactacatcagcctgctggcctcaggcacctacctggccacagcctacatcctggtggtggcgggcactgtcgtcatggtgactggggtcttgggctgctgcgccaccttcaaggagcgtcggaacctgctgcgcctgtacttcatcctgctcctcatcatctttctgctggagatcatcgctggtatcctcgcctacgcctactaccagcagctgaacacggagctcaaggagaacctgaaggacaccatgaccaagcgctaccaccagccgggccatgaggctgtgaccagcgctgtggaccagctgcagcaggagttccactgctgtggcagcaacaactcacaggactggcgagacagtgagtggatccgctcacaggaggccggtggccgtgtggtcccagacagctgctgcaagacggtggtggctctttgtggacagcgagaccatgcctccaacatctacaaggtggagggcggctgcatcaccaagttggagaccttcatccaggagcacctgagggtcattggggctgtggggatcggcattgcctgtgtgcaggtctttggcatgatcttcacgtgctgcctgtacaggagtctcaagctggagcactactgaccctgccttgggccttgctgctgctgcacccaactactgagctgagaccactgagtaccaggggctgggctccctgatgacacccaccctgtgccatcaccataacctctggggaccccaacctcagaggcagcttcaagtgccttttgctgcgcaccaatgcccagcaggggaggtgaggggggctggcggggcgaagtttggggggtgttttgtggggctccccggacatactctctgcctggtggtcagatgcaggttggaaggggccttgctgagtggcgcaaggccgagcgttcccagcagggggagaaacccttcacaccccaggcccttcaggaactggggctttgccttgcagccacatggccccatcccagttggggaagccaggtgagctctgacccttgggcctgggcctctgcccctcccaacccagccgtcgtctccctcgacagcgcccctgctgtcttccccaccgcagtcaccaccacccgaaatgccacgtggtcactgtgcactgccctgttcatgtgcctctgcggggcagggccttcctggttttgtacactgctgtacccagatgcctacaaccatccctgccacatacaggtgctcaataaacacttgtagagcagatggacgagctcgctgtgctggtaacaga

SEQ ID NO: 377 - DNA, 1938 bp, Homo sapiens
agggccgggtcgccacagcccagggcctctggctaggctggtcgccgtcttacctccgggcccgcctcccgcccagctcctccgtccttggacgggatgggcccttgctgggctattggcgcccccagggctgcagctcgcccggcctccgcagtgccaggtcgacccccagcgcctacacccacgcgggttcagacctgccgagcgcccgccgccgcgggaggggcttgaggccggggcggggcggggccggggcggggcgtccccctcgtaggctccgggccgcgcattctcagcgctgggagccgccgcccccgcagctgccgccgccgccagggcccggactcggacgcgtggtaggctgtagctgccgctgtttgtgggggaagggccagtgatgggtctggagcgaaggccaagagtggggcacctgggggaagcctagagtcctggggagcttctgtccacctgtcctgcagaggagtcgtttccagcccggctgccccaggatgggtgagttcaacgagaagaagacaacatgtggcaccgtttgcctcaagtacctgctgtttacctacaattgctgcttctggctggctggcctggctgtcatggcagtgggcatctggacgctggccctcaagagtgactacatcagcctgctggcctcaggcacctacctggccacagcctacatcctggtggtggcgggcactgtcgtcatggtgactggggtcttgggctgctgcgccaccttcaaggagcgtcggaacctgctgcgcctgtacttcatcctgctcctcatcatctttctgctggagatcatcgctggtatcctcgcctacgcctactaccagcagctgaacacggagctcaaggagaacctgaaggacaccatgaccaagcgctaccaccagccgggccatgaggctgtgaccagcgctgtggaccagctgcagcaggagttccactgctgtggcagcaacaactcacaggactggcgagacagtgagtggatccgctcacaggaggccggtggccgtgtggtcccagacagctgctgcaagacggtggtggctctttgtggacagcgagaccatgcctccaacatctacaaggtggagggcggctgcatcaccaagttggagaccttcatccaggagcacctgagggtcattggggctgtggggatcggcattgcctgtgtgcaggtctttggcatgatcttcacgtgctgcctgtacaggagtctcaagctggagcactactgaccctgccttgggccttgctgctgctgcacccaactactgagctgagaccactgagtaccaggggctgggctccctgatgacacccaccctgtgccatcaccataacctctggggaccccaacctcagaggcagcttcaagtgccttttgctgcgcaccaatgcccagcaggggaggtgaggggggctggcggggcgaagtttggggggtgttttgtggggctccccggacatactctctgcctggtggtcagatgcaggttggaaggggccttgctgagtggcgcaaggccgagcgttcccagcagggggagaaacccttcacaccccaggcccttcaggaactggggctttgccttgcagccacatggccccatcccagttggggaagccaggtgagctctgacccttgggcctgggcctctgcccctcccaacccagccgtcgtctccctcgacagcgcccctgctgtcttccccaccgcagtcaccaccacccgaaatgccacgtggtcactgtgcactgccctgttcatgtgcctctgcggggcagggccttcctggttttgtacactgctgtacccagatgcctacaaccatccctgccacatacaggtgctcaataaacacttgtagagcagatggacgagctcgctgtgctggtaacaga

SEQ ID NO: 378 - DNA, 1805 bp, Homo sapiens
ctccgggcccgcctcccgcccagctcctccgtccttggacgggatgggcccttgctgggctattggcgcccccagggctgcagctcgcccggcctccgcagtgccaggtcgacccccagcgcctacacccacgcgggttcagacctgccgagcgcccgccgccgcgggaggggcttgaggccggggcggggcggggccggggcggggcgtccccctcgtaggctccgggccgcgcattctcagcgctgggagccgccgcccccgcagctgccgccgccgccagggcccggactcggacgcgtggtagcctagagtcctggggagcttctgtccacctgtcctgcagaggagtcgtttccagcccggctgccccaggatgggtgagttcaacgagaagaagacaacatgtggcaccgtttgcctcaagtacctgctgtttacctacaattgctgcttctggctggctggcctggctgtcatggcagtgggcatctggacgctggccctcaagagtgactacatcagcctgctggcctcaggcacctacctggccacagcctacatcctggtggtggcgggcactgtcgtcatggtgactggggtcttgggctgctgcgccaccttcaaggagcgtcggaacctgctgcgcctgtacttcatcctgctcctcatcatctttctgctggagatcatcgctggtatcctcgcctacgcctactaccagcagctgaacacggagctcaaggagaacctgaaggacaccatgaccaagcgctaccaccagccgggccatgaggctgtgaccagcgctgtggaccagctgcagcaggagttccactgctgtggcagcaacaactcacaggactggcgagacagtgagtggatccgctcacaggaggccggtggccgtgtggtcccagacagctgctgcaagacggtggtggctctttgtggacagcgagaccatgcctccaacatctacaaggtggagggcggctgcatcaccaagttggagaccttcatccaggagcacctgagggtcattggggctgtggggatcggcattgcctgtgtgcaggtctttggcatgatcttcacgtgctgcctgtacaggagtctcaagctggagcactactgaccctgccttgggccttgctgctgctgcacccaactactgagctgagaccactgagtaccaggggctgggctccctgatgacacccaccctgtgccatcaccataacctctggggaccccaacctcagaggcagcttcaagtgccttttgctgcgcaccaatgcccagcaggggaggtgaggggggctggcggggcgaagtttggggggtgttttgtggggctccccggacatactctctgcctggtggtcagatgcaggttggaaggggccttgctgagtggcgcaaggccgagcgttcccagcagggggagaaacccttcacaccccaggcccttcaggaactggggctttgccttgcagccacatggccccatcccagttggggaagccaggtgagctctgacccttgggcctgggcctctgcccctcccaacccagccgtcgtctccctcgacagcgcccctgctgtcttccccaccgcagtcaccaccacccgaaatgccacgtggtcactgtgcactgccctgttcatgtgcctctgcggggcagggccttcctggttttgtacactgctgtacccagatgcctacaaccatccctgccacatacaggtgctcaataaacacttgtagagcagatggacgagctcgctgtgctggtaacaga

SEQ ID NO: 379 - DNA, 1486 bp, Homo sapiens
tcggacgcgtggtagcctagagtcctggggagcttctgtccacctgtcctgcagaggagtcgtttccagcccggctgccccaggatgggtgagttcaacgagaagaagacaacatgtggcaccgtttgcctcaagtacctgctgtttacctacaattgctgcttctggctggctggcctggctgtcatggcagtgggcatctggacgctggccctcaagagtgactacatcagcctgctggcctcaggcacctacctggccacagcctacatcctggtggtggcgggcactgtcgtcatggtgactggggtcttgggctgctgcgccaccttcaaggagcgtcggaacctgctgcgcctgtacttcatcctgctcctcatcatctttctgctggagatcatcgctggtatcctcgcctacgcctactaccagcagctgaacacggagctcaaggagaacctgaaggacaccatgaccaggcgctaccaccagtcgggccatgaggctgtgaccagcgctgtggaccagctgcagcaggagttccactgctgtggcagcaacaactcacaggactggcgagacagtgagtggatccgctcacaggaggccggtggccgtgtggtcccagacagctgctgcaagacggtggtggctctttgtggacagcgagaccatgcctccaacatctacaaggtggagggcggctgcatcaccaagttggagaccttcatccaggagcacctgagggtcattggggctgtggggatcggcattgcctgtgtgcaggtctttggcatgatcttcacgtgctgcctgtacaggagtctcaagctggagcactactgaccctgccttgggccttgctgctgctgcacccaactactgagctgagaccactgagtaccaggggctgggctccctgatgacacccaccctgtgccatcaccataacctctggggaccccaacctcagaggcagcttcaagtgccttttcgtgcgcaccaatgcccagcaggggaggtgaggggggctggcggggcgaagtttggggggtgttttgtggggctccccggacatactctctgcctggtggtcagatgcaggttggaaggggccttgctgagtggcgcaaggccgagatcgttcccagcagggggagaaacccttcacaccccaggcccttcaggaactggggctttgccttgcagccacatggccccatcccagttggggaagccaggtgagctctgacccttgggcctgggcctctgcccctcccaacccagccgtcgtctccctcgacagcgcccctgctgtcttccccaccgcagtcaccaccacccgaaatgccacgtggtcactgtgcactgccctgttcatgtgcctctgcggggcagggccttcctggttttgtacactgctgtacccagatgcctacaaccatccctgccacatacaggtgctcaataaacacttgtagagcag

SEQ ID NO: 380 - DNA, 2902 bp, Homo sapiens
agcttccgctaaacgggctcagagccacgcggcacgcccgggaggctttctctggctggtaaccgctactcccggacaccagaccaccgccttccgtacacaggggcccgcatcccaccctcccggacctaagagcctgggtcccctgtttccggaggtccgcttcccggcccccagattctggcatcccagccctcagtgtccaagacccaggcagcccgggtccccgcctcccggatccaggcgtccgggatctgcgccaccagaacctagcctcctgcagacctccgccatctgggggcactcaacctcctggagccaagggccccacgtcccacccagagaaactctcgtattcccagctcctagggccaaggaacccgggcgctccgaactcccagctttcggacatctggcacacggggcagagcagagaagcctcagcgcccagcctggggaatttaaacactccagcttccaagagccaaggaacttcagtgctgtgaactcacaactctaaggagccctccaaagttccagtctccaggtgctgttactcaactcagtcctaggaacgtcgggtcctgggaaggagcccaagcgctcccagccagcttccaggcgctaagaaaccccggtgcttcccatcatggtggccgatcctcctcgagactccaaggggctcgcagcggcggagcccaccgccaacgggggcctggcgctggcctccatcgaggaccaaggcgcggcagcaggcggctactgcggttcccgggaccaggtgcgccgctgccttcgagccaacctgcttgtgctgctgacagtggtggccgtggtggccggcgtggcgctgggactgggggtgtcgggggccgggggtgcgctggcgttgggcccggagcgcttgagcgccttcgtcttcccgggcgagctgctgctgcgtctgctgcggatgatcatcttgccgctggtggtgtgcagcttgatcggcggcgccgccagcctggaccccggcgcgctcggccgtctgggcgcctgggcgctgctctttttcctggtcaccacgctgctggcgtcggcgctcggagtgggcttggcgctggctctgcagccgggcgccgcctccgccgccatcaacgcctccgtgggagccgcgggcagtgccgaaaatgcccccagcaaggaggtgctcgattcgttcctggatcttgcgagaaatatcttcccttccaacctggtgtcagcagcctttcgctcatactctaccacctatgaagagaggaatatcaccggaaccagggtgaaggtgcccgtggggcaggaggtggaggggatgaacatcctgggcttggtagtgtttgccatcgtctttggtgtggcgctgcggaagctggggcctgaaggggagctgcttatccgcttcttcaactccttcaatgaggccaccatggttctggtctcctggatcatgtggtacgcccctgtgggcatcatgttcctggtggctggcaagatcgtggagatggaggatgtgggtttactctttgcccgccttggcaagtacattctgtgctgcctgctgggtcacgccatccatgggctcctggtactgcccctcatctacttcctcttcacccgcaaaaacccctaccgcttcctgtggggcatcgtgacgccgctggccactgcctttgggacctcttccagttccgccacgctgccgctgatgatgaagtgcgtggaggagaataatggcgtggccaagcacatcagccgtttcatcctgcccatcggcgccaccgtcaacatggacggtgccgcgctcttccagtgcgtggccgcagtgttcattgcacagctcagccagcagtccttggacttcgtaaagatcatcaccatcctggtcacggccacagcgtccagcgtgggggcagcgggcatccctgctggaggtgtcctcactctggccatcatcctcgaagcagtcaacctcccggtcgaccatatctccttgatcctggctgtggactggctagtcgaccggtcctgtaccgtcctcaatgtagaaggtgacgctctgggggcaggactcctccaaaattacgtggaccgtacggagtcgagaagcacagagcctgagttgatacaagtgaagagtgagctgcccctggatccgctgccagtccccactgaggaaggaaaccccctcctcaaacactatcgggggcccgcaggggatgccacggtcgcctctgagaaggaatcagtcatgtaaaccccgggagggaccttccctgccctgctgggggtgctctttggacactggattatgaggaatggataaatggatgagctagggctctgggggtctgcctgcacactctggggagccaggggccccagcaccctccaggacaggagatctgggatgcctggctgctggagtacatgtgttcacaagggttactcctcaaaacccccagttctcactcatgtccccaactcaaggctagaaaacagcaagatggagaaataatgttctgctgcgtccccaccgtgacctgcctggcctcccctgtctcagggagcaggtcacaggtcaccatggggaattctagcccccactggggggatgttacaacaccatgctggttattttggcggctgtagttgtggggggatgtgtgtgtgcacgtgtgtgtgtgtgtgtgtgtgtgtgtgtgtgtgtgtgttctgtgacctcctgtccccatggtacgtcccaccctgtccccagatcccctattccctccacaataacagaaacactcccagggactctggggagaggctgaggacaaatacctgctgtcactccagaggacattttttttagcaataaaattgagtgtcaactatttaa

SEQ ID NO: 381 - DNA, 2476 bp, Homo sapiens
ggcccgcatcccaccctcccggacctaagagcctgggtcccctgtttccggaggtccgcttcccggcccccagattctggcatcccagccctcagtgtccacaaggaacccgggcgctccgaactcccagctttcggacatctggcacacggggcagagcagagaagcctcagcgcccagcctggggaatttaaacactccagcttccaagagccaaggaacttcagtgctgtgaactcacaactctaaggagccctccaaagttccagtctccaggtgctgttactcaactcagtcctaggaacgtcgggtcctgggaaggagcccaagcgctcccagccagcttccaggcgctaagaaaccccggtgcttcccatcatggtggccgatcctcctcgagactccaaggggctcgcagcggcggagcccaccgccaacgggggcctggcgctggcctccatcgaggaccaaggcgcggcagcaggcggctactgcggttcccgggaccaggtgcgccgctgccttcgagccaacctgcttgtgctgctgacagtggtggccgtggtggccggcgtggcgctgggactgggggtgtcgggggccgggggtgcgctggcgttgggcccggagcgcttgagcgccttcgtcttcccgggcgagctgctgctgcgtctgctgcggatgatcatcttgccgctggtggtgtgcagcttgatcggcggcgccgccagcctggaccccggcgcgctcggccgtctgggcgcctgggcgctgctctttttcctggtcaccacgctgctggcgtcggcgctcggagtgggcttggcgctggctctgcagccgggcgccgcctccgccgccatcaacgcctccgtgggagccgcgggcagtgccgaaaatgcccccagcaaggaggtgctcgattcgttcctggatcttgcgagaaatatcttcccttccaacctggtgtcagcagcctttcgctcatactctaccacctatgaagagaggaatatcaccggaaccagggtgaaggtgcccgtggggcaggaggtggaggggatgaacatcctgggcttggtagtgtttgccatcgtctttggtgtggcgctgcggaagctggggcctgaaggggagctgcttatccgcttcttcaactccttcaatgaggccaccatggttctggtctcctggatcatgtggtacgcccctgtgggcatcatgttcctggtggctggcaagatcgtggagatggaggatgtgggtttactctttgcccgccttggcaagtacattctgtgctgcctgctgggtcacgccatccatgggctcctggtactgcccctcatctacttcctcttcacccgcaaaaacccctaccgcttcctgtggggcatcgtgacgccgctggccactgcctttgggacctcttccagttccgccacgctgccgctgatgatgaagtgcgtggaggagaataatggcgtggccaagcacatcagccgtttcatcctgcccatcggcgccaccgtcaacatggacggtgccgcgctcttccagtgcgtggccgcagtgttcattgcacagctcagccagcagtccttggacttcgtaaagatcatcaccatcctggtcacggccacagcgtccagcgtgggggcagcgggcatccctgctggaggtgtcctcactctggccatcatcctcgaagcagtcaacctcccggtcgaccatatctccttgatcctggctgtggactggctagtcgaccggtcctgtaccgtcctcaatgtagaaggtgacgctctgggggcaggactcctccaaaattacgtggaccgtacggagtcgagaagcacagagcctgagttgatacaagtgaagagtgagctgcccctggatccgctgccagtccccactgaggaaggaaaccccctcctcaaacactatcgggggcccgcaggggatgccacggtcgcctctgagaaggaatcagtcatgtaaaccccgggagggaccttccctgccctgctgggggtgctctttggacactggattatgaggaatggataaatggatgagctagggctctgggggtctgcctgcacactctggggagccaggggccccagcaccctccaggacaggagatctgggatgcctggctgctggagtacatgtgttcacaagggttactcctcaaaacccccagttctcactcatgtccccaactcaaggctagaaaacagcaagatggagaaataatgttctgctgcgtccccaccgtgacctgcctggcctcccctgtctcagggagcaggtcacaggtcaccatggggaattctagcccccactggggggatgttacaacaccatgctggttattttggcggctgtagttgtggggggatgtgtgtgtgcacgtgtgtgtgtgtgtgtgtgtgttgttctgtgacctcctgtccccatggtacgt

SEQ ID NO: 382 - DNA, 5010 bp, Homo sapiens
ggcggctcgggacggaggacgcgctagtgtgagtgcgggcttctagaactacaccgaccctcgtgtcctcccttcatcctgcggggctggctggagcggccgctccggtgctgtccagcagccatagggagccgcacggggagcgggaaagcggtcgcggccccaggcggggcggccgggatggagcggggccgcgagcctgtggggaaggggctgtggcggcgcctcgagcggctgcaggttcttctgtgtggcagttcagaatgatggatcaagctagatcagcattctctaacttgtttggtggagaaccattgtcatatacccggttcagcctggctcggcaagtagatggcgataacagtcatgtggagatgaaacttgctgtagatgaagaagaaaatgctgacaataacacaaaggccaatgtcacaaaaccaaaaaggtgtagtggaagtatctgctatgggactattgctgtgatcgtctttttcttgattggatttatgattggctacttgggctattgtaaaggggtagaaccaaaaactgagtgtgagagactggcaggaaccgagtctccagtgagggaggagccaggagaggacttccctgcagcacgtcgcttatattgggatgacctgaagagaaagttgtcggagaaactggacagcacagacttcaccagcaccatcaagctgctgaatgaaaattcatatgtccctcgtgaggctggatctcaaaaagatgaaaatcttgcgttgtatgttgaaaatcaatttcgtgaatttaaactcagcaaagtctggcgtgatcaacattttgttaagattcaggtcaaagacagcgctcaaaactcggtgatcatagttgataagaacggtagacttgtttacctggtggagaatcctgggggttatgtggcgtatagtaaggctgcaacagttactggtaaactggtccatgctaattttggtactaaaaaagattttgaggatttatacactcctgtgaatggatctatagtgattgtcagagcagggaaaatcacctttgcagaaaaggttgcaaatgctgaaagcttaaatgcaattggtgtgttgatatacatggaccagactaaatttcccattgttaacgcagaactttcattctttggacatgctcatctggggacaggtgacccttacacacctggattcccttccttcaatcacactcagtttccaccatctcggtcatcaggattgcctaatatacctgtccagacaatctccagagctgctgcagaaaagctgtttgggaatatggaaggagactgtccctctgactggaaaacagactctacatgtaggatggtaacctcagaaagcaagaatgtgaagctcactgtgagcaatgtgctgaaagagataaaaattcttaacatctttggagttattaaaggctttgtagaaccagatcactatgttgtagttggggcccagagagatgcatggggccctggagctgcaaaatccggtgtaggcacagctctcctattgaaacttgcccagatgttctcagatatggtcttaaaagatgggtttcagcccagcagaagcattatctttgccagttggagtgctggagactttggatcggttggtgccactgaatggctagagggatacctttcgtccctgcatttaaaggctttcacttatattaatctggataaagcggttcttggtaccagcaacttcaaggtttctgccagcccactgttgtatacgcttattgagaaaacaatgcaaaatgtgaagcatccggttactgggcaatttctatatcaggacagcaactgggccagcaaagttgagaaactcactttagacaatgctgctttccctttccttgcatattctggaatcccagcagtttctttctgtttttgcgaggacacagattatccttatttgggtaccaccatggacacctataaggaactgattgagaggattcctgagttgaacaaagtggcacgagcagctgcagaggtcgctggtcagttcgtgattaaactaacccatgatgttgaattgaacctggactatgagaggtacaacagccaactgctttcatttgtgagggatctgaaccaatacagagcagacataaaggaaatgggcctgagtttacagtggctgtattctgctcgtggagacttcttccgtgctacttccagactaacaacagatttcgggaatgctgagaaaacagacagatttgtcatgaagaaactcaatgatcgtgtcatgagagtggagtatcacttcctctctccctacgtatctccaaaagagtctcctttccgacatgtcttctggggctccggctctcacacgctgccagctttactggagaacttgaaactgcgtaaacaaaataacggtgcttttaatgaaacgctgttcagaaaccagttggctctagctacttggactattcagggagctgcaaatgccctctctggtgacgtttgggacattgacaatgagttttaaatgtgatacccatagcttccatgagaacagcagggtagtctggtttctagacttgtgctgatcgtgctaaattttcagtagggctacaaaacctgatgttaaaattccatcccatcatcttggtactactagatgtctttaggcagcagcttttaatacagggtagataacctgtacttcaagttaaagtgaataaccacttaaaaaatgtccatgatggaatattcccctatctctagaattttaagtgctttgtaatgggaactgcctctttcctgttgttgttaatgaaaatgtcagaaaccagttatgtgaatgatctctctgaatcctaagggctggtctctgctgaaggttgtaagtggttcgcttactttgagtgatcctccaacttcatttgatgctaaataggagataccaggttgaaagacctctccaaatgagatctaagcctttccataaggaatgtagcaggtttcctcattcctgaaagaaacagttaactttcagaagagatgggcttgttttcttgccaatgaggtctgaaatggaggtccttctgctggataaaatgaggttcaactgttgattgcaggaataaggccttaatatgttaacctcagtgtcatttatgaaaagaggggaccagaagccaaagacttagtatattttcttttcctctgtcccttcccccataagcctccatttagttctttgttatttttgtttcttccaaagcacattgaaagagaaccagtttcaggtgtttagttgcagactcagtttgtcagactttaaagaataatatgctgccaaattttggccaaagtgttaatcttaggggagagctttctgtccttttggcactgagatatttattgtttatttatcagtgacagagttcactataaatggtgtttttttaatagaatataattatcggaagcagtgccttccataattatgacagttatactgtcggttttttttaaataaaagcagcatctgctaataaaacccaacagatactggaagttttgcatttatggtcaacacttaagggttttagaaaacagccgtcagccaaatgtaattgaataaagttgaagctaagatttagagatgaattaaatttaattaggggttgctaagaagcgagcactgaccagataagaatgctggttttcctaaatgcagtgaattgtgaccaagttataaatcaatgtcacttaaaggctgtggtagtactcctgcaaaattttatagctcagtttatccaaggtgtaactctaattcccatttgcaaaatttccagtacctttgtcacaatcctaacacattatcgggagcagtgtcttccataatgtataaagaacaaggtagtttttacctaccacagtgtctgtatcggagacagtgatctccatatgttacactaagggtgtaagtaattatcgggaacagtgtttcccataattttcttcatgcaatgacatcttcaaagcttgaagatcgttagtatctaacatgtatcccaactcctataattccctatcttttagttttagttgcagaaacattttgtggtcattaagcattgggtgggtaaattcaaccactgtaaaatgaaattactacaaaatttgaaatttagcttgggtttttgttacctttatggtttctccaggtcctctacttaatgagatagcagcatacatttataatgtttgctattgacaagtcattttaatttatcacattatttgcatgttacctcctataaacttagtgcggacaagttttaatccagaattgaccttttgacttaaagcagagggactttgtatagaaggtttgggggctgtggggaaggagagtcccctgaaggtctgacacgtctgcctacccattcgtggtgatcaattaaatgtaggtatgaataagttcgaagctccgtgagtgaaccatcatataaacgtgtagtacagctgtttgtcatagggcagttggaaacggcctcctagggaaaagttcatagggtctcttcaggttcttagtgtcacttacctagatttacagcctcacttgaatgtgtcactactcacagtctctttaatcttcagttttatctttaatctcctcttttatcttggactgacatttagcgtagctaagtgaaaaggtcatagctgagattcctggttcgggtgttacgcacacgtacttaaatgaaagcatgtggcatgttcatcgtataacacaatatgaatacagggcatgcattttgcagcagtgagtctcttcagaaaacccttttctacagttagggttgagttacttcctatcaagccagtacgtgctaacaggctcaatattcctgaatgaaatatcagactagtgacaagctcctggtcttgagatgtcttctcgttaaggagtagggccttttggaggtaaaggtata

SEQ ID NO: 383 - DNA, 3433 bp, Homo sapiens
gaggcgcggggggcgggggaggctcaggagcgggcggtgacggcgacggcggcggcagaggaggcagcggctgggccgggccccgtgcgtctgtccgcgccccgtggatgcgaatcggccgcggcggaggcggcggcggcggaggaggcggcggcgggaggaggagtcggtgagccggctccgggccggaggggcgcggaggatgaggccgctgcctggcgctcttggcgtggcggcggccgccgcgctgtggctgctgctgctgctgctgccccggacccgggcggacgagcacgaacacacgtatcaagataaagaggaagttgtcttatggatgaatactgttgggccctaccataatcgtcaagaaacatataagtacttttcacttccattctgtgtggggtcaaaaaaaagtatcagtcattaccatgaaactctgggagaagcacttcaaggggttgaattggaatttagtggtctggatattaaatttaaagatgatgtgatgccagccacttactgtgaaattgatttagataaagaaaagagagatgcatttgtatatgccataaaaaatcattactggtaccagatgtacatagatgatttaccaatatggggtattgttggtgaggctgatgaaaatggagaagattactatctttggacctataaaaaacttgaaataggttttaatggaaatcgaattgttgatgttaatctaactagtgaaggaaaggtgaaactggttccaaatactaaaatccagatgtcatattcagtaaaatggaaaaagtcagatgtgaaatttgaagatcgatttgacaaatatcttgatccgtccttttttcaacatcggattcattggttttcaattttcaactccttcatgatggtgatcttcttggtgggcttagtttcaatgattttaatgagaacattaagaaaagattatgctcggtacagtaaagaggaagaaatggatgatatggatagagacctaggagatgaatatggatggaaacaggtgcatggagatgtatttagaccatcaagtcacccactgatattttcctctctgattggttctggatgtcagatatttgctgtgtctctcatcgttattattgttgcaatgatagaagatttatatactgagaggggatcaatgctcagtacagccatatttgtctatgctgctacgtctccagtgaatggttattttggaggaagtctgtatgctagacaaggaggaaggagatggataaagcagatgtttattggggcattccttatcccagctatggtgtgtggcactgccttcttcatcaatttcatagccatttattaccatgcttcaagagccattccttttggaacaatggtggccgtttgttgcatctgtttttttgttattcttcctctaaatcttgttggtacaatacttggccgaaatctgtcaggtcagcccaactttccttgtcgtgtcaatgctgtgcctcgtcctataccggagaaaaaatggttcatggagcctgcggttattgtttgcctgggtggaattttaccttttggttcaatctttattgaaatgtatttcatcttcacgtctttctgggcatataagatctattatgtctatggcttcatgatgctggtgctggttatcctgtgcattgtgactgtctgtgtgactattgtgtgcacatattttctactaaatgcagaagattaccggtggcaatggacaagttttctctctgctgcatcaactgcaatctatgtttacatgtattccttttactactattttttcaaaacaaagatgtatggcttatttcaaacatcattttactttggatatatggcggtatttagcacagccttggggataatgtgtggagcgattggttacatgggaacaagtgcctttgtccgaaaaatctatactaatgtgaaaattgactagagacccaagaaaacctggaactttggatcaatttctttttcataggggtggaacttgcacagcaaaaacaaacaaacgcaagaagagatttgggctttaacacactgggtactttgtgggtctctctttcgtcggtggcttaaagtaacatctatttccattgatcctaggttcttcctgactgctttctccaactgttcacagcaaatgcttggattttatgcagtaggcattactacagtacatggctaatcttcccaaaaactagctcattaaagatgaaatagaccagctctcttcagtgaagaggacaaatagtttatttaaagcatttgttccaataaaataaatagagggaaacttggatgctaaaattacttttttcctcttatttttactgccattgtcgacctattgtgggacatttttatatattgaatctgggttcttttttgactttttttttttcccaatccaacagcatccttttttttaaaagagagaattagaaaatattaaatcctgcatgtaatatatctgctgtcatcttagttggaccaacttcccatttatttatcttaaaactatacagttacatcttaattccatccaaagaagatacagtttgaagacagaagtgtactctctacaatgcaatttactgtacagttagaaagcaaagtgttaaatggagaagatacttgtttttattaaacattttgagatttagataaactacattttaactgaatgtctaaagtgattatcttttttccccccaagttagtcttaaatcttttgggtttgaatgaaggttttacataagaaattattaaaaacaaggggggtgggtaataaatgtatataacattaaataatgtaacgtaggtgtagattcccaaatgcatttggatgtacagatcgactacagagtacttttttcttatgatgattggtgtagaaatgtgtgatttgggtgggcttttacatcttgcctaccattgcatgaaacattggggtttcttcaaaatgtgtgtgtcatacttcttttgggaggggggttgttttcttctgtttattttctgagactcctacaggagccaaatttgtaatttagagacacttaattttgttaatcctgtctgggacacttaagtaacatctaaagcattattgctttagaatgttcaaataaaatttcctgaccaaattgttttgtggaaatagatgtgtttgcaatttgaagatatctttctgtccagaaggcaaaattaccgaatgccatttttaaaagtatgctataaactatgctactctcatacaggggacccgtattttaaaatctccagacttgcttacatctagattatccagcacaatcataaagtgaatgacaaaccctttgaatgaaattgtggcacaaaatctgttcaggttggtgtaccgtgtaaagtggggatg

SEQ ID NO: 384 - DNA, 6130 bp, Homo sapiens
gaggcgcggggggcgggggaggctcaggagcgggcggtgacggcgacggcggcggcagaggaggcagcggctgggccgggccccgtgcgtctgtccgcgccccgtggatgcgaatcggccgcggcggaggcggcggcggcggaggaggcggcggcgggaggaggagtcggtgagccggctccgggccggaggggcgcggaggatgaggccgctgcctggcgctcttggcgtggcggcggccgccgcgctgtggctgctgctgctgctgctgccccggacccgggcggacgagcacgaacacacgtatcaagataaagaggaagttgtcttatggatgaatactgttgggccctaccataatcgtcaagaaacatataagtacttttcacttccattctgtgtggggtcaaaaaaaagtatcagtcattaccatgaaactctgggagaagcacttcaaggggttgaattggaatttagtggtctggatattaaatttaaagatgatgtgatgccagccacttactgtgaaattgatttagataaagaaaagagagatgcatttgtatatgccataaaaaatcattactggtaccagatgtacatagatgatttaccaatatggggtattgttggtgaggctgatgaaaatggagaagattactatctttggacctataaaaaacttgaaataggttttaatggaaatcgaattgttgatgttaatctaactagtgaaggaaaggtgaaactggttccaaatactaaaatccagatgtcatattcagtaaaatggaaaaagtcagatgtgaaatttgaagatcgatttgacaaatatcttgatccgtccttttttcaacatcggattcattggttttcaattttcaactccttcatgatggtgatcttcttggtgggcttagtttcaatgattttaatgagaacattaagaaaagattatgctcggtacagtaaagaggaagaaatggatgatatggatagagacctaggagatgaatatggatggaaacaggtgcatggagatgtatttagaccatcaagtcacccactgatattttcctctctgattggttctggatgtcagatatttgctgtgtctctcatcgttattattgttgcaatgatagaagatttatatactgagaggggatcaatgctcagtacagccatatttgtctatgctgctacgtctccagtgaatggttattttggaggaagtctgtatgctagacaaggaggaaggagatggataaagcagatgtttattggggcattccttatcccagctatggtgtgtggcactgccttcttcatcaatttcatagccatttattaccatgcttcaagagccattccttttggaacaatggtggccgtttgttgcatctgtttttttgttattcttcctctaaatcttgttggtacaatacttggccgaaatctgtcaggtcagcccaactttccttgtcgtgtcaatgctgtgcctcgtcctataccggagaaaaaatggttcatggagcctgcggttattgtttgcctgggtggaattttaccttttggttcaatctttattgaaatgtatttcatcttcacgtctttctgggcatataagatctattatgtctatggcttcatgatgctggtgctggttatcctgtgcattgtgactgtctgtgtgactattgtgtgcacatattttctactaaatgcagaagattaccggtggcaatggacaagttttctctctgctgcatcaactgcaatctatgtttacatgtattccttttactactattttttcaaaacaaagatgtatggcttatttcaaacatcattttactttggatatatggcggtatttagcacagccttggggataatgtgtggagcgattggttacatgggaacaagtgcctttgtccgaaaaatctatactaatgtgaaaattgactagagacccaagaaaacctggaactttggatcaatttctttttcataggggtggaacttgcacagcaaaaacaaacaaacgcaagaagagatttgggctttaacacactgggtactttgtgggtctctctttcgtcggtggcttaaagtaacatctatttccattgatcctaggttcttcctgactgctttctccaactgttcacagcaaatgcttggattttatgcagtaggcattactacagtacatggctaatcttcccaaaaactagctcattaaagatgaaatagaccagctctcttcagtgaagaggacaaatagtttatttaaagcatttgttccaataaaataaatagagggaaacttggatgctaaaattacatgaataggaatcttcctggcacttagtgtttctatgttattgaaaaatgatgttccagaaagattacttttttcctcttatttttactgccattgtcgacctattgtgggacatttttatatattgaatctgggttcttttttgactttttttttttcccaatccaacagcatccttttttttaaaagagagaattagaaaatattaaatcctgcatgtaatatatctgctgtcatcttagttggaccaacttcccatttatttatcttaaaactatacagttacatcttaattccatccaaagaagatacagtttgaagacagaagtgtactctctacaatgcaatttactgtacagttagaaagcaaagtgttaaatggagaagatacttgtttttattaaacattttgagatttagataaactacattttaactgaatgtctaaagtgattatcttttttccccccaagttagtcttaaatcttttgggtttgaatgaaggttttacataagaaattattaaaaacaaggggggtgggtaataaatgtatataacattaaataatgtaacgtaggtgtagattcccaaatgcatttggatgtacagatcgactacagagtacttttttcttatgatgattggtgtagaaatgtgtgatttgggtgggcttttacatcttgcctaccattgcatgaaacattggggtttcttcaaaatgtgtgtgtcatacttcttttgggaggggggttgttttcttctgtttattttctgagactcctacaggagccaaatttgtaatttagagacacttaattttgttaatcctgtctgggacacttaagtaacatctaaagcattattgctttagaatgttcaaataaaatttcctgaccaaattgttttgtggaaatagatgtgtttgcaatttgaagatatctttctgtccagaaggcaaaattaccgaatgccatttttaaaagtatgctataaactatgctactctcatacaggggacccgtattttaaaatctccagacttgcttacatctagattatccagcacaatcataaagtgaatgacaaaccctttgaatgaaattgtggcacaaaatctgttcaggttggtgtaccgtgtaaagtggggatggggtaaaagtggttaacgtactgttggatcaacaaataaaggttacagttttgtaagagaagtgatttgaatacatttttctggaactattcataatatgaagttttcctagaaccactgagtttctagtttaatagtttgctatgcaaatgaccacctaaaacaatactttatattgttatttttagaaagactcaaaacacctgtatttaaaccttaatatgaaaatcatgcaattaatagttacacaagatgttttcattacaaaatatgtacctatatattgatggactctacatcctatattgtgacatgtaagtcctttaaaaggtgaaaagtatgatttcttaccacttaagtatgattgatatgatccaacaaatttgatcagaagctgtaggtaaatcctcttctgaagccaaaatggtatattaaatataatttattggtacttccattttctcttccttcttacttgcctttaagatcttataaaaaagaaactaaaagttaatatttagttgcctatattatgtaaccttttaactatatataaagtacttttttggtttctttctcaccacttttattcaaaagtacttttaacataccaatacatagtctgtctgatgggagtataaattggacagtaaggttttgtcttaataaaatgaaatttgtttctcatgatatgaatcttgcaggtaagatgtagggtttattgaaaatgtgtgggttaaatgctttcaggtacaccaattctttctactaaattgagctctatttgaagttctttggaatctgtggtgaaaaataattttctgatttccaaatacattaagagcattaaatgaatattaatcacctttaaagtcttttagaaaaggacttgtattggtttttggctgcatagaggggttgaataagtgtatgtatgtgtgtgcgtgtgtgtgtgtcttcttaaagaagatgtaattcacaaatagtttagctccctagcgctcagttgtagaatagaaaatagaacattattcaagttaattgaaaggtgaggtttttatacccccactaatgctgtgtatctgtctttcgtttgttaacattatttgcttaatttctttcaactcacactttggataatactatcaaaaactaaggctaaacattccttgtgtatctttaagcatgcttctcctgaaatttaactacattagtagttgacatttgtatacatatatcctaatacaagagtaggataaggtggaaatgtaatggcctgagggatggtgaagcattctttcagtatttttcatcatgttgggctcctagattgtactggggttgcccataaatcaaaccccatactcttagaattcattatattatggtgatatccgaacctagtgaatggtatgcttgggtgttttccattgagagtggatggacctctttataaagttggttgctgcaaaatccagttcttccaaaagccactttatttagggtttattcacaagtcatatccattttggtacagtgtttgtttcctaatatttattaaccaccttataccaaatgtcttgcaaagaaatgttattaaaaccttgaatttttacaaatgtaaaaaacaaaaagtgtattaatgtatttgttcaggaaaagctacataccgaagggcttttgtatatgaattctgtggtggggagacccatttgtaatctatatggcagttccatctgggttttaagtttagatttcaccgtgtcttagtgcttcattctattggtttattggaacatgtaataaataggagtagtgatgtattaaaacacaagtattcattaatgttttatatcttcactaaaattctatagttatgaaactattttatcaatcaaggtgttatatttcagtcagaagtgaaaatttatgaagagtatttggaagtgtgtacagaaataaactagacttacaggtaggctagatcagaacgttaacatatgaacctgcagaaatctggtaagacttaaattcagtgtgaggaataactctagttctctcctatgagcatttcctaaaagccatctgatttggcattcttactggagctgcagacagaaatctacaaagacaaaagtaaacaaaattaagttattattccactgttaggaatggaaataaacttgtgaagtctgtttattttgaagtattggtgaactaggcttgctaattgataactgcagcagtttgtgtttactccagttcatcagcttaggtcatttgaaagatataagagcttaaggcaagaaagaaataacatggaattctatttgaaggacaacagaacattcttggaaaagcagctccagttggtttttcagctgtcaaacttgaatgtgtaagtccccacagagcatggacagtcggtgcagagttccaaggaaacaattattgcctgatgaccacttccattttgtatacactctttggttcgtataggccatattccaactggctttttagtaatagaaatccagtatataatgtatcaaatacaattgaggttctaacctagtgtgttaatttatctgaatttggatttttaaaaagtaataaaaagttaaatgta

SEQ ID NO: 385 - DNA, 3208 bp, Homo sapiens
cccgtgattcattcacagcggcagacgagcgccaggaaagggttatttgatctgatccctcaagttccggaggcagcagtatcaagataaagaggaagttgtcttatggatgaatactgttgggccctaccataatcgtcaagaaacatataagtacttttcacttccattctgtgtggggtcaaaaaaaagtatcagtcattaccatgaaactctgggagaagcacttcaaggggttgaattggaatttagtggtctggatattaaatttaaagatgatgtgatgccagccacttactgtgaaattgatttagataaagaaaagagagatgcatttgtatatgccataaaaaatcattactggtaccagatgtacatagatgatttaccaatatggggtattgttggtgaggctgatgaaaatggagaagattactatctttggacctataaaaaacttgaaataggttttaatggaaatcgaattgttgatgttaatctaactagtgaaggaaaggtgaaactggttccaaatactaaaatccagatgtcatattcagtaaaatggaaaaagtcagatgtgaaatttgaagatcgatttgacaaatatcttgatccgtccttttttcaacatcggattcattggttttcaattttcaactccttcatgatggtgatcttcttggtgggcttagtttcaatgattttaatgagaacattaagaaaagattatgctcggtacagtaaagaggaagaaatggatgatatggatagagacctaggagatgaatatggatggaaacaggtgcatggagatgtatttagaccatcaagtcacccactgatattttcctctctgattggttctggatgtcagatatttgctgtgtctctcatcgttattattgttgcaatgatagaagatttatatactgagaggggatcaatgctcagtacagccatatttgtctatgctgctacgtctccagtgaatggttattttggaggaagtctgtatgctagacaaggaggaaggagatggataaagcagatgtttattggggcattccttatcccagctatggtgtgtggcactgccttcttcatcaatttcatagccatttattaccatgcttcaagagccattccttttggaacaatggtggccgtttgttgcatctgtttttttgttattcttcctctaaatcttgttggtacaatacttggccgaaatctgtcaggtcagcccaactttccttgtcgtgtcaatgctgtgcctcgtcctataccggagaaaaaatggttcatggagcctgcggttattgtttgcctgggtggaattttaccttttggttcaatctttattgaaatgtatttcatcttcacgtctttctgggcatataagatctattatgtctatggcttcatgatgctggtgctggttatcctgtgcattgtgactgtctgtgtgactattgtgtgcacatattttctactaaatgcagaagattaccggtggcaatggacaagttttctctctgctgcatcaactgcaatctatgtttacatgtattccttttactactattttttcaaaacaaagatgtatggcttatttcaaacatcattttactttggatatatggcggtatttagcacagccttggggataatgtgtggagcgattggttacatgggaacaagtgcctttgtccgaaaaatctatactaatgtgaaaattgactagagacccaagaaaacctggaactttggatcaatttctttttcataggggtggaacttgcacagcaaaaacaaacaaacgcaagaagagatttgggctttaacacactgggtactttgtgggtctctctttcgtcggtggcttaaagtaacatctatttccattgatcctaggttcttcctgactgctttctccaactgttcacagcaaatgcttggattttatgcagtaggcattactacagtacatggctaatcttcccaaaaactagctcattaaagatgaaatagaccagctctcttcagtgaagaggacaaatagtttatttaaagcatttgttccaataaaataaatagagggaaacttggatgctaaaattacttttttcctcttatttttactgccattgtcgacctattgtgggacatttttatatattgaatctgggttcttttttgactttttttttttcccaatccaacagcatccttttttttaaaagagagaattagaaaatattaaatcctgcatgtaatatatctgctgtcatcttagttggaccaacttcccatttatttatcttaaaactatacagttacatcttaattccatccaaagaagatacagtttgaagacagaagtgtactctctacaatgcaatttactgtacagttagaaagcaaagtgttaaatggagaagatacttgtttttattaaacattttgagatttagataaactacattttaactgaatgtctaaagtgattatcttttttccccccaagttagtcttaaatcttttgggtttgaatgaaggttttacataagaaattattaaaaacaaggggggtgggtaataaatgtatataacattaaataatgtaacgtaggtgtagattcccaaatgcatttggatgtacagatcgactacagagtacttttttcttatgatgattggtgtagaaatgtgtgatttgggtgggcttttacatcttgcctaccattgcatgaaacattggggtttcttcaaaatgtgtgtgtcatacttcttttgggaggggggttgttttcttctgtttattttctgagactcctacaggagccaaatttgtaatttagagacacttaattttgttaatcctgtctgggacacttaagtaacatctaaagcattattgctttagaatgttcaaataaaatttcctgaccaaattgttttgtggaaatagatgtgtttgcaatttgaagatatctttctgtccagaaggcaaaattaccgaatgccatttttaaaagtatgctataaactatgctactctcatacaggggacccgtattttaaaatctccagacttgcttacatctagattatccagcacaatcataaagtgaatgacaaaccctttgaatgaaattgtggcacaaaatctgttcaggttggtgtaccgtgtaaagtggggatg

SEQ ID NO: 386 - DNA, 6850 bp, Homo sapiens
tgccggtggcctctgtggccgtccaggctagcggcggcccgcaggcggcggggagaaagactctctcacctggtcttgcggctgtggccaccgccggccaggggtgtggagggcgtgctgccggagacgtccgccgggctctgcagttccgccgggggtcgggcagctatggagccgcggcccacggcgccctcctccggcgccccgggactggccggggtcggggagacgccgtcagccgctgcgctggccgcagccagggtggaactgcccggcacggctgtgccctcggtgccggaggatgctgcgcccgcgagccgggacggcggcggggtccgcgatgagggccccgcggcggccggggacgggctgggcagacccttggggcccaccccgagccagagccgtttccaggtggacctggtttccgagaacgccgggcgggccgctgctgcggcggcggcggcggcggcggcagcggcggcggctggtgctggggcgggggccaagcagacccccgcggacggggaagccagcggcgagagcgagccggctaaaggcagcgaggaagccaagggccgcttccgcgtgaacttcgtggacccagctgcctcctcgtcggctgaagacagcctgtcagatgctgccggggtcggagtcgacgggcccaacgtgagcttccagaacggcggggacacggtgctgagcgagggcagcagcctgcactccggcggcggcggcggcagtgggcaccaccagcactactattatgatacccacaccaacacctactacctgcgcaccttcggccacaacaccatggacgctgtgcccaggatcgatcactaccggcacacagccgcgcagctgggcgagaagctgctccggcctagcctggcggagctccacgacgagctggaaaaggaaccttttgaggatggctttgcaaatggggaagaaagtactccaaccagagatgctgtggtcacgtatactgcagaaagtaaaggagtcgtgaagtttggctggatcaagggtgtattagtacgttgtatgttaaacatttggggtgtgatgcttttcattagattgtcatggattgtgggtcaagctggaataggtctatcagtccttgtaataatgatggccactgttgtgacaactatcacaggattgtctacttcagcaatagcaactaatggatttgtaagaggaggaggagcatattatttaatatctagaagtctagggccagaatttggtggtgcaattggtctaatcttcgcctttgccaacgctgttgcagttgctatgtatgtggttggatttgcagaaaccgtggtggagttgcttaaggaacattccatacttatgatagatgaaatcaatgatatccgaattattggagccattacagtcgtgattcttttaggtatctcagtagctggaatggagtgggaagcaaaagctcagattgttcttttggtgatcctacttcttgctattggtgatttcgtcataggaacatttatcccactggagagcaagaagccaaaagggttttttggttataaatctgaaatatttaatgagaactttgggcccgattttcgagaggaagagactttcttttctgtatttgccatcttttttcctgctgcaactggtattctggctggagcaaatatctcaggtgatcttgcagatcctcagtcagccatacccaaaggaacactcctagccattttaattactacattggtttacgtaggaattgcagtatctgtaggttcttgtgttgttcgagatgccactggaaacgttaatgacactatcgtaacagagctaacaaactgtacttctgcagcctgcaaattaaactttgatttttcatcttgtgaaagcagtccttgttcctatggcctaatgaacaacttccaggtaatgagtatggtgtcaggatttacaccactaatttctgcaggtatattttcagccactctttcttcagcattagcatccctagtgagtgctcccaaaatatttcaggctctatgtaaggacaacatctacccagctttccagatgtttgctaaaggttatgggaaaaataatgaacctcttcgtggctacatcttaacattcttaattgcacttggattcatcttaattgctgaactgaatgttattgcaccaattatctcaaacttcttccttgcatcatatgcattgatcaatttttcagtattccatgcatcacttgcaaaatctccaggatggcgtcctgcattcaaatactacaacatgtggatatcacttcttggagcaattctttgttgcatagtaatgttcgtcattaactggtgggctgcattgctaacatatgtgatagtccttgggctgtatatttatgttacctacaaaaaaccagatgtgaattggggatcctctacacaagccctgacttacctgaatgcactgcagcattcaattcgtctttctggagtggaagaccacgtgaaaaactttaggccacagtgtcttgttatgacaggtgctccaaactcacgtccagctttacttcatcttgttcatgatttcacaaaaaatgttggtttgatgatctgtggccatgtacatatgggtcctcgaagacaagccatgaaagagatgtccatcgatcaagccaaatatcagcgatggcttattaagaacaaaatgaaggcattttatgctccagtacatgcagatgacttgagagaaggtgcacagtatttgatgcaggctgctggtcttggtcgtatgaagccaaacacacttgtccttggatttaagaaagattggttgcaagcagatatgagggatgtggatatgtatataaacttatttcatgatgcttttgacatacaatatggagtagtggttattcgcctaaaagaaggtctggatatatctcatcttcaaggacaagaagaattattgtcatcacaagagaaatctcctggcaccaaggatgtggtagtaagtgtggaatatagtaaaaagtccgatttagatacttccaaaccactcagtgaaaaaccaattacacacaaagttgaggaagaggatggcaagactgcaactcaaccactgttgaaaaaagaatccaaaggccctattgtgcctttaaatgtagctgaccaaaagcttcttgaagctagtacacagtttcagaaaaaacaaggaaagaatactattgatgtctggtggctttttgatgatggaggtttgaccttattgataccttaccttctgacgaccaagaaaaaatggaaagactgtaagatcagagtattcattggtggaaagataaacagaatagaccatgaccggagagcgatggctactttgcttagcaagttccggatagacttttctgatatcatggttctaggagatatcaataccaaaccaaagaaagaaaatattatagcttttgaggaaatcattgagccatacagacttcatgaagatgataaagagcaagatattgcagataaaatgaaagaagatgaaccatggcgaataacagataatgagcttgaactttataagaccaagacataccggcagatcaggttaaatgagttattaaaggaacattcaagcacagctaatattattgtcatgagtctcccagttgcacgaaaaggtgctgtgtctagtgctctctacatggcatggttagaagctctatctaaggacctaccaccaatcctcctagttcgtgggaatcatcagagtgtccttaccttctattcataaatgttctatacagtggacagccctccagaatggtacttcagtgcctagtgtagtaactgaaatcttcaatgacacattaacatcacaatggcgaatggtgacttttctttcacgatttcattaatttgaaagcacacaggaaagttgctccattgataacgtgtatggagacttcggttttagtcaattccatatctcaatcttaatggtgattcttctctgttgaactgaagtttgtgagagtagttttcctttgctacttgaatagcaataaaagcgtgttaactttttgattgatgaaagaagtacaaaaagcctttagccttgaggtgccttctgaaattaaccaaatttcatccatatatcctcttttataaacttatagaatgtcaaactttgccttcaactgtttttatttctagtctcttccactttaaaacaaaatgaacactgcttgtcttcttccattgaccatttagtgttgagtactgtatgtgttttgttaattctataaaggtatctgttagatattaaaggtgagaattagggcaggttaatcaaaaatggggaaggggaaatggtaaccaaaaagtaaccccatggtaaggtttatatgagtatatgtgaatatagagctaggaaaaaaagcccccccaaatacctttttaacccctctgattggctattattactatatttattattatttattgaaaccttagggaagattgaagattcatcccatacttctatataccatgcttaaaaatcacgtcattctttaaacaaaaatactcaagatcatttatatttatttggagagaaaactgtcctaatttagaatttccctcaaatctgagggacttttaagaaatgctaacagatttttctggaggaaatttagacaaaacaatgtcatttagtagaatatttcagtatttaagtggaatttcagtatactgtactatcctttataagtcattaaaataatgtttcatcaaatggttaaatggaccactggtttcttagagaaatgtttttaggcttaattcattcaattgtcaagtacacttagtcttaatacactcaggtttgaacagattattctgaatattaaaatttaatccattcttaatattttaaaacttttgttaagaaaaactgccagtttgtgcttttgaaatgtctgttttgacatcatagtctagtaaaattttgacagtgcatatgtactgttactaaaagctttatatgaaattattaatgtgaagtttttcatttataattcaaggaaggatttcctgaaaacatttcaagggatttatgtctacatatttgtgtgtgtgtgtgtatatatatgtaatatgcatacacagatgcatatgtgtatatataatgaaatttatgttgctggtattttgcattttaaagtgatcaagattcattaggcaaactttggtttaagtaaacatatgttcaaatcagattaacagatacaggtttcatagagaacaaaggtgatcatttgaagggcatgctgtaatttcacacaattttccagttcaaaaatggagaatacttcgcctaaaatactgttaagtgggttaattgatacaagtttctgtggtggaaaatttatgcaggttttcacgaatcctttttttttttttttttttttttgagacggagtctcgctctgttgccacgctggaatgcagtaacgtgatcttggctcactgcgacctccacctccccagttcaagcgattctcctgcctcagcctccctagtagctgggactacgggtgcacgccaccatgcccagctaatttttgtattttgagtagagacagggtttcaccgtgttggctaggatggtgtctatctcttgaccttgtgatccacccgcctcagcctcccagagtgctgggattacaggtgcgagccactgcgcctggctggttttcatgaatcttgatagacatctataacgttattattttcagtggtgtgcagcatttttgcttcatgagtatgacctaggtatagagatctgataacttgaattcagaatattaagaaaatgaagtaactgattttctaaaaaaaaaaaaaaaaaaaatttctacattataactcacagcattgttccattgcaggttttgcaatgtttgggggtaaagacagtagaaatattattcagtaaacaataatgtgtgaacttttaagatggataatagggcatggactgagtgctgctatcttgaaatgtgcacaggtacacttaccttttttttttttttttttaagtttttcccattcaggaaaacaacattgtgatctgtactacaggaaccaaatgtcatgcgtcatacatgtgggtataaagtacataaaatatatctaactattcataatgtggggtgggtaatactgtctgtgaaataatgtaagaagcttttcacttaaaaaaaatgcattactttcacttaacactagacaccaggtcgaaaattttcaaggttatagtacttatttcaacaattcttagagatgctagctagtgttgaagctaaaaatagctttatttatgctgaattgtgatttttttatgccaaattttttttagttctaatcattgatgatagcttggaaataaataattatgccatggcatttgacagttcattattcctataagaattaaattgagtttagagagaatggtggtgttgagctgattattaacagttactgaaatcaaatatttatttgttacattattccatttgtattttaggtttccttttacattctttttatatgcattctgacattacatattttttaagactatggaaataatttaaagatttaagctctggtggatgattatctgctaagtaagtctgaaaatgtaatattttgataatactgtaatatacctgtcacacaaatgcttttctaatgttttaaccttgagtattgcagttgctgctttgtacagaggttactgcaataaaggaagtggattcattaaacct

SEQ ID NO: 387 - DNA, 6433 bp, Homo sapiens
tgccggtggcctctgtggccgtccaggctagcggcggcccgcaggcggcggggagaaagactctctcacctggtcttgcggctgtggccaccgccggccaggggtgtggagggcgtgctgccggagacgtccgccgggctctgcagttccgccgggggtcgggcagctatggagccgcggcccacggcgccctcctccggcgccccgggactggccggggtcggggagacgccgtcagccgctgcgctggccgcagccagggtggaactgcccggcacggctgtgccctcggtgccggaggatgctgcgcccgcgagccgggacggcggcggggtccgcgatgagggccccgcggcggccggggacgggctgggcagacccttggggcccaccccgagccagagccgtttccaggtggacctggtttccgagaacgccgggcgggccgctgctgcggcggcggcggcggcggcggcagcggcggcggctggtgctggggcgggggccaagcagacccccgcggacggggaagccagcggcgagagcgagccggctaaaggcagcgaggaagccaagggccgcttccgcgtgaacttcgtggacccagctgcctcctcgtcggctgaagacagcctgtcagatgctgccggggtcggagtcgacgggcccaacgtgagcttccagaacggcggggacacggtgctgagcgagggcagcagcctgcactccggcggcggcggcggcagtgggcaccaccagcactactattatgatacccacaccaacacctactacctgcgcaccttcggccacaacaccatggacgctgtgcccaggatcgatcactaccggcacacagccgcgcagctgggcgagaagctgctccggcctagcctggcggagctccacgacgagctggaaaaggaaccttttgaggatggctttgcaaatggggaagaaagtactccaaccagagatgctgtggtcacgtatactgcagaaagtaaaggagtcgtgaagtttggctggatcaagggtgtattagtacgttgtatgttaaacatttggggtgtgatgcttttcattagattgtcatggattgtgggtcaagctggaataggtctatcagtccttgtaataatgatggccactgttgtgacaactatcacaggattgtctacttcagcaatagcaactaatggatttgtaagaggaggaggagcatattatttaatatctagaagtctagggccagaatttggtggtgcaattggtctaatcttcgcctttgccaacgctgttgcagttgctatgtatgtggttggatttgcagaaaccgtggtggagttgcttaaggaacattccatacttatgatagatgaaatcaatgatatccgaattattggagccattacagtcgtgattcttttaggtatctcagtagctggaatggagtgggaagcaaaagctcagattgttcttttggtgatcctacttcttgctattggtgatttcgtcataggaacatttatcccactggagagcaagaagccaaaagggttttttggttataaatctgaaatatttaatgagaactttgggcccgattttcgagaggaagagactttcttttctgtatttgccatcttttttcctgctgcaactggtattctggctggagcaaatatctcaggtgatcttgcagatcctcagtcagccatacccaaaggaacactcctagccattttaattactacattggtttacgtaggaattgcagtatctgtaggttcttgtgttgttcgagatgccactggaaacgttaatgacactatcgtaacagagctaacaaactgtacttctgcagcctgcaaattaaactttgatttttcatcttgtgaaagcagtccttgttcctatggcctaatgaacaacttccaggtaatgagtatggtgtcaggatttacaccactaatttctgcaggtatattttcagccactctttcttcagcattagcatccctagtgagtgctcccaaaatatttcaggctctatgtaaggacaacatctacccagctttccagatgtttgctaaaggttatgggaaaaataatgaacctcttcgtggctacatcttaacattcttaattgcacttggattcatcttaattgctgaactgaatgttattgcaccaattatctcaaacttcttccttgcatcatatgcattgatcaatttttcagtattccatgcatcacttgcaaaatctccaggatggcgtcctgcattcaaatactacaacatgtggatatcacttcttggagcaattctttgttgcatagtaatgttcgtcattaactggtgggctgcattgctaacatatgtgatagtccttgggctgtatatttatgttacctacaaaaaaccagatgtgaattggggatcctctacacaagccctgacttacctgaatgcactgcagcattcaattcgtctttctggagtggaagaccacgtgaaaaactttaggccacagtgtcttgttatgacaggtgctccaaactcacgtccagctttacttcatcttgttcatgatttcacaaaaaatgttggtttgatgatctgtggccatgtacatatgggtcctcgaagacaagccatgaaagagatgtccatcgatcaagccaaatatcagcgatggcttattaagaacaaaatgaaggcattttatgctccagtacatgcagatgacttgagagaaggtgcacagtatttgatgcaggctgctggtcttggtcgtatgaagccaaacacacttgtccttggatttaagaaagattggttgcaagcagatatgagggatgtggatatgtatataaacttatttcatgatgcttttgacatacaatatggagtagtggttattcgcctaaaagaaggtctggatatatctcatcttcaaggacaagaagaattattgtcatcacaagagaaatctcctggcaccaaggatgtggtagtaagtgtggaatatagtaaaaagtccgatttagatacttccaaaccactcagtgaaaaaccaattacacacaaagttgaggaagaggatggcaagactgcaactcaaccactgttgaaaaaagaatccaaaggccctattgtgcctttaaatgtagctgaccaaaagcttcttgaagctagtacacagtttcagaaaaaacaaggaaagaatactattgatgtctggtggctttttgatgatggaggtttgaccttattgataccttaccttctgacgaccaagaaaaaatggaaagactgtaagatcagagtattcattggtggaaagataaacagaatagaccatgaccggagagcgatggctactttgcttagcaagttccggatagacttttctgatatcatggttctaggagatatcaataccaaaccaaagaaagaaaatattatagcttttgaggaaatcattgagccatacagacttcatgaagatgataaagagcaagatattgcagataaaatgaaagaagatgaaccatggcgaataacagataatgagcttgaactttataagaccaagacataccggcagatcaggttaaatgagttattaaaggaacattcaagcacagctaatattattgtcatgagtctcccagttgcacgaaaaggtgctgtgtctagtgctctctacatggcatggttagaagctctatctaaggacctaccaccaatcctcctagttcgtgggaatcatcagagtgtccttaccttctattcataaatgttctatacagtggacagccctccagaatggtacttcagtgcctagtgtagtaactgaaatcttcaatgacacattaacatcacaatggcgaatggtgacttttctttcacgatttcattaatttgaaagcacacaggaaagttgctccattgataacgtgtatggagacttcggttttagtcaattccatatctcaatcttaatggtgattcttctctgttgaactgaagtttgtgagagtagttttcctttgctacttgaatagcaataaaagcgtgttaactttttgattgatgaaagaagtacaaaaagcctttagccttgaggtgccttctgaaattaaccaaatttcatccatatatcctcttttataaacttatagaatgtcaaactttgccttcaactgtttttatttctagtctcttccactttaaaacaaaatgaacactgcttgtcttcttccattgaccatttagtgttgagtactgtatgtgttttgttaattctataaaggtatctgttagatattaaaggtgagaattagggcaggttaatcaaaaatggggaaggggaaatggtaaccaaaaagtaaccccatggtaaggtttatatgagtatatgtgaatatagagctaggaaaaaaagcccccccaaatacctttttaacccctctgattggctattattactatatttattattatttattgaaaccttagggaagattgaagattcatcccatacttctatataccatgcttaaaaatcacgtcattctttaaacaaaaatactcaagatcatttatatttatttggagagaaaactgtcctaatttagaatttccctcaaatctgagggacttttaagaaatgctaacagatttttctggaggaaatttagacaaaacaatgtcatttagtagaatatttcagtatttaagtggaatttcagtatactgtactatcctttataagtcattaaaataatgtttcatcaaatggttaaatggaccactggtttcttagagaaatgtttttaggcttaattcattcaattgtcaagtacacttagtcttaatacactcaggtttgaacagattattctgaatattaaaatttaatccattcttaatattttaaaacttttgttaagaaaaactgccagtttgtgcttttgaaatgtctgttttgacatcatagtctagtaaaattttgacagtgcatatgtactgttactaaaagctttatatgaaattattaatgtgaagtttttcatttataattcaaggaaggatttcctgaaaacatttcaagggatttatgtctacatatttgtgtgtgtgtgtgtatatatatgtaatatgcatacacagatgcatatgtgtatatataatgaaatttatgttgctggtattttgcattttaaagtgatcaagattcattaggcaaactttggtttaagtaaacatatgttcaaatcagattaacagatacaggtttcatagagaacaaaggtgatcatttgaagggcatgctgtaatttcacacaattttccagttcaaaaatggagaatacttcgcctaaaatactgttaagtgggttaattgatacaagtttctgtggtggaaaatttatgcaggttttcacgaatcctttttttttttttttttttttttgagacggagtctcgctctgttgccacgctggaatgcagtaacgtgatcttggctcactgcgacctccacctccccagttcaagcgattctcctgcctcagcctccctagtagctgggactacgggtgcacgccaccatgcccagctaatttttgtattttgagtagagacagggtttcaccgtgttggctaggatggtgtctatctcttgaccttgtgatccacccgcctcagcctcccagagtgctgggattacaggtgcgagccactgcgcctggctggttttcatgaatcttgatagacatctataacgttattattttcagtggtgtgcagcatttttgcttcatgagtatgacctaggtatagagatctgataacttgaattcagaatattaagaaaatgaagtaactgattttctaaaaaaaaaaaaaaaaaaaatttctacattataactcacagcattgttccattgcaggttttgcaatgtttgggggtaaagacagtagaaatattattcagtaaacaataatgtgtgaacttttaagatggataatagggcatggactgagtgctgctatcttgaaatgtgcacaggtacacttaccttttttttttttttttttaagtttttcccattcaggaaaacaacattgtgatctgtactacaggaaccaaatgtcatgcgtcatacatgtgggtataaagtacataaaatatatctaactattcataatgtggggtgggtaatactgtctgtgaaataatgtaagaagcttttcacttaaaaaaaatgcattactttcacttaacactagacaccaggtcgaaaattttcaaggttatagtacttatttcaacaattcttagagatgctagctagtgttgaattctaatcattgatgatagcttggaaataaataattatgccatggcatttgacagt

SEQ ID NO: 388 - DNA, 4769 bp, Homo sapiens
cgaccggtgcgcttgccagatccgccgcgaagccgggatcgaaggcgacagcgcggccaagggggcgcggccgggacaagctgggggccggttgcccggggcagggacggcggcgacccggccgctggggaggcaggaagatagacccacggatcttaggaagggatccgagagcgcagctgtgaaactggctggggctgggggcacgaaaccgatcagcgctacggagcgcagcggccggcgggttccagtgtcctccggcggcgcggggagcaggtgaacaggtcctcacgcccagctccgcgccctcacgcgctctcgccgggaccccgcttccgctggcagccatgggccccggccccagccgcgcgccccgcgccccacgcctgatgctctgtgcgctcgccttgatggtggcggccggcggctgcgtcgtctccgccttcaacctggatacccgattcctggtagtgaaggaggccgggaacccgggcagcctcttcggctactcggtcgccctccatcggcagacagagcggcagcagcgctacctgctcctggctggtgccccccgggagctcgctgtgcccgatggctacaccaaccggactggtgctgtgtacctgtgcccactcactgcccacaaggatgactgtgagcggatgaacatcacagtgaaaaatgaccctggccatcacattattgaggacatgtggcttggagtgactgtggccagccagggccctgcaggcagagttctggtctgtgcccaccgctacacccaggtgctgtggtcagggtcagaagaccagcggcgcatggtgggcaagtgctacgtgcgaggcaatgacctagagctggactccagtgatgactggcagacctaccacaacgagatgtgcaatagcaacacagactacctggagacgggcatgtgccagctgggcaccagcggtggcttcacccagaacactgtgtacttcggcgcccccggtgcctacaactggaaaggaaacagctacatgattcagcgcaaggagtgggacttatctgagtatagttacaaggacccagaggaccaaggaaacctctatattgggtacacgatgcaggtaggcagcttcatcctgcaccccaaaaacatcaccattgtgacaggtgccccacggcaccgacatatgggcgcggtgttcttgctgagccaggaggcaggcggagacctgcggaggaggcaggtgctggagggctcgcaggtgggcgcctattttggcagcgccattgccctggcagacctgaacaatgatgggtggcaggacctcctggtgggcgccccctactacttcgagaggaaagaggaagtagggggtgccatctatgtcttcatgaaccaggcgggaacctccttccctgctcacccctcactccttcttcatggccccagtggctctgcctttggtttatctgtggccagcattggtgacatcaaccaggatggatttcaggatattgctgtgggagctccgtttgaaggcttgggcaaagtgtacatctatcacagtagctctaaggggctccttagacagccccagcaggtaatccatggagagaagctgggactgcctgggttggccaccttcggctattccctcagtgggcagatggatgtggatgagaacttctacccagaccttctagtgggaagcctgtcagaccacattgtgctgctgcgggcccggcccgtcatcaacatcgtccacaagaccttggtgcccaggccagctgtgctggaccctgcactttgcacggccacctcttgtgtgcaagtggagctgtgctttgcttacaaccagagtgccgggaaccccaactacaggcgaaacatcaccctggcctacactctggaggctgacagggaccgccggccgccccggctccgctttgccggcagtgagtccgctgtcttccacggcttcttctccatgcccgagatgcgctgccagaagctggagctgctcctgatggacaacctccgtgacaaactccgccccatcatcatctccatgaactactctttacctttgcggatgcccgatcgcccccggctggggctgcggtccctggacgcctacccgatcctcaaccaggcacaggctctggagaaccacactgaggtccagttccagaaggagtgcgggcctgacaacaagtgtgagagcaacttgcagatgcgggcagccttcgtgtcagagcagcagcagaagctgagcaggctccagtacagcagagacgtccggaaattgctcctgagcatcaacgtgacgaacacccggacctcggagcgctccggggaggacgcccacgaggcgctgctcaccctggtggtgcctcccgccctgctgctgtcctcagtgcgcccccccggggcctgccaagctaatgagaccatcttttgcgagctggggaaccccttcaaacggaaccagaggatggagctgctcatcgcctttgaggtcatcggggtgaccctgcacacaagggaccttcaggtgcagctgcagctctccacgtcgagtcaccaggacaacctgtggcccatgatcctcactctgctggtggactatacactccagacctcgcttagcatggtaaatcaccggctacaaagcttctttggggggacagtgatgggtgagtctggcatgaaaactgtggaggatgtaggaagccccctcaagtatgaattccaggtgggcccaatgggggaggggctggtgggcctggggaccctggtcctaggtctggagtggccctacgaagtcagcaatggcaagtggctgctgtatcccacggagatcaccgtccatggcaatgggtcctggccctgccgaccacctggagaccttatcaaccctctcaacctcactctttctgaccctggggacaggccatcatccccacagcgcaggcggcgacagctggatccagggggaggccagggccccccacctgtcactctggctgctgccaaaaaagccaagtctgagactgtgctgacctgtgccacagggcgtgcccactgtgtgtggctagagtgccccatccctgatgcccccgttgtcaccaacgtgactgtgaaggcacgagtgtggaacagcaccttcatcgaggattacagagactttgaccgagtccgggtaaatggctgggctaccctattcctccgaaccagcatccccaccatcaacatggagaacaagaccacgtggttctctgtggacattgactcggagctggtggaggagctgccggccgaaatcgagctgtggctggtgctggtggccgtgggtgcagggctgctgctgctggggctgatcatcctcctgctgtggaagtgtgacttctttaagcggacccgctattatcagatcatgcccaagtaccacgcagtgcggatccgggaggaggagcgctacccacctccagggagcaccctgcccaccaagaagcactgggtgaccagctggcagactcgggaccaatactactgacgtcctccctgatcccaccccctcctcccccagtgtcccctttcttcctatttatcataagttatgcctctgacagtccacaggggccaccacctttggctggtagcagcaggctcaggcacatacacctcgtcaagagcatgcacatgctgtctggccctggggatcttcccacaggagggccagcgctgtggaccttacaacgccgagtgcactgcattcctgtgccctagatgcacgtggggcccactgctcgtggactgtgctggtgcatcacggatggtgcatgggctcgccgtgtctcagcctctgccagcgccaaaacaagccaaagagcctcccaccagagccgggaggaaaaggcccctgcaatgtggtgacacctccccctttcacactggatccatcttgagccacagtcactggattgactttgctgtcaaaactactgacagggagcagcccccgggccgctggctggtgggcccccaatgacacccatgccagagaggtggggatcctgcctaaggttgtctacgggggcacttggaggacctggcgtgctcagacccaacagcaaaggaactagaaagaaggacccagaacggcttgctttcctgcatctctgtgaagcctctctccttggccacagactgaactcgcagggaatgcagcaggaaggaacaaagacaggcaaacggcaacgtagcctgggctcactgtgctggggcacggcgggatcctccacagagaggaggggaccaattctggacagacagatgttgggaggatacagaggagatgccacttctcactcaccactaccagccagcctcagaaggccccagagagaccctgcaagaccacggagggagcgacacttgaatgtagaataggcagggggccctgccccaccccatccagccagaccccacgctgaccatgcgtcaggggcctagaggtggagttcttagctatccttggctttcagagccagcctggctctgccccctcccccatgggctgtgtcctaaggcccatttgagaagctgaggctagttccagaaaacctctcctgacccctgcctgttggcaggcccactccccagccccagccccttccatggtactgtagcaggggaattccctccccctccttgtgccttctttgtatataggcttctcacggcgaccaataaacagctcccagtttgtatgcag

SEQ ID NO: 389 - DNA, 4712 bp, Homo sapiens
cgaccggtgcgcttgccagatccgccgcgaagccgggatcgaaggcgacagcgcggccaagggggcgcggccgggacaagctgggggccggttgcccggggcagggacggcggcgacccggccgctggggaggcaggaagatagacccacggatcttaggaagggatccgagagcgcagctgtgaaactggctggggctgggggcacgaaaccgatcagcgctacggagcgcagcggccggcgggttccagtgtcctccggcggcgcggggagcaggtgaacaggtcctcacgcccagctccgcgccctcacgcgctctcgccgggaccccgcttccgctggcagccatgggccccggccccagccgcgcgccccgcgccccacgcctgatgctctgtgcgctcgccttgatggtggcggccggcggctgcgtcgtctccgccttcaacctggatacccgattcctggtagtgaaggaggccgggaacccgggcagcctcttcggctactcggtcgccctccatcggcagacagagcggcagcagcgctacctgctcctggctggtgccccccgggagctcgctgtgcccgatggctacaccaaccggactggtgctgtgtacctgtgcccactcactgcccacaaggatgactgtgagcggatgaacatcacagtgaaaaatgaccctggccatcacattattgaggacatgtggcttggagtgactgtggccagccagggccctgcaggcagagttctggtctgtgcccaccgctacacccaggtgctgtggtcagggtcagaagaccagcggcgcatggtgggcaagtgctacgtgcgaggcaatgacctagagctggactccagtgatgactggcagacctaccacaacgagatgtgcaatagcaacacagactacctggagacgggcatgtgccagctgggcaccagcggtggcttcacccagaacactgtgtacttcggcgcccccggtgcctacaactggaaaggaaacagctacatgattcagcgcaaggagtgggacttatctgagtatagttacaaggacccagaggaccaaggaaacctctatattgggtacacgatgcaggtaggcagcttcatcctgcaccccaaaaacatcaccattgtgacaggtgccccacggcaccgacatatgggcgcggtgttcttgctgagccaggaggcaggcggagacctgcggaggaggcaggtgctggagggctcgcaggtgggcgcctattttggcagcgccattgccctggcagacctgaacaatgatgggtggcaggacctcctggtgggcgccccctactacttcgagaggaaagaggaagtagggggtgccatctatgtcttcatgaaccaggcgggaacctccttccctgctcacccctcactccttcttcatggccccagtggctctgcctttggtttatctgtggccagcattggtgacatcaaccaggatggatttcaggatattgctgtgggagctccgtttgaaggcttgggcaaagtgtacatctatcacagtagctctaaggggctccttagacagccccagcaggtaatccatggagagaagctgggactgcctgggttggccaccttcggctattccctcagtgggcagatggatgtggatgagaacttctacccagaccttctagtgggaagcctgtcagaccacattgtgctgctgcgggcccggcccgtcatcaacatcgtccacaagaccttggtgcccaggccagctgtgctggaccctgcactttgcacggccacctcttgtgtgcaagtggagctgtgctttgcttacaaccagagtgccgggaaccccaactacaggcgaaacatcaccctggcctacactctggaggctgacagggaccgccggccgccccggctccgctttgccggcagtgagtccgctgtcttccacggcttcttctccatgcccgagatgcgctgccagaagctggagctgctcctgatggacaacctccgtgacaaactccgccccatcatcatctccatgaactactctttacctttgcggatgcccgatcgcccccggctggggctgcggtccctggacgcctacccgatcctcaaccaggcacaggctctggagaaccacactgaggtccagttccagaaggagtgcgggcctgacaacaagtgtgagagcaacttgcagatgcgggcagccttcgtgtcagagcagcagcagaagctgagcaggctccagtacagcagagacgtccggaaattgctcctgagcatcaacgtgacgaacacccggacctcggagcgctccggggaggacgcccacgaggcgctgctcaccctggtggtgcctcccgccctgctgctgtcctcagtgcgcccccccggggcctgccaagctaatgagaccatcttttgcgagctggggaaccccttcaaacggaaccagaggatggagctgctcatcgcctttgaggtcatcggggtgaccctgcacacaagggaccttcaggtgcagctgcagctctccacgtcgagtcaccaggacaacctgtggcccatgatcctcactctgctggtggactatacactccagacctcgcttagcatggtaaatcaccggctacaaagcttctttggggggacagtgatgggtgagtctggcatgaaaactgtggaggatgtaggaagccccctcaagtatgaattccaggtgggcccaatgggggaggggctggtgggcctggggaccctggtcctaggtctggagtggccctacgaagtcagcaatggcaagtggctgctgtatcccacggagatcaccgtccatggcaatgggtcctggccctgccgaccacctggagaccttatcaaccctctcaacctcactctttctgaccctggggacaggccatcatccccacagcgcaggcggcgacagctggatccagggggaggccagggccccccacctgtcactctggctgctgccaaaaaagccaagtctgagactgtgctgacctgtgccacagggcgtgcccactgtgtgtggctagagtgccccatccctgatgcccccgttgtcaccaacgtgactgtgaaggcacgagtgtggaacagcaccttcatcgaggattacagagactttgaccgagtccgggtaaatggctgggctaccctattcctccgaaccagcatccccaccatcaacatggagaacaagaccacgtggttctctgtggacattgactcggagctggtggaggagctgccggccgaaatcgagctgtggctggtgctggtggccgtgggtgcagggctgctgctgctggggctgatcatcctcctgctgtggaagtgtgacttctttaagcggacccgctattatcagatcatgcccaagtaccacgcagtgcggatccgggaggaggagcgctacccacctccagggagcaccctgcccaccaagaagcactgggtgaccagctggcagactcgggaccaatactactgacgtcctccctgatcccaccccctcctcccccagtgtcccctttcttcctatttatcataagttatgcctctgacagtccacaggggccaccacctttggctggtagcagcaggctcaggcacatacacctcgtcaagagcatgcacatgctgtctggccctggggatcttcccacaggagggccagcgctgtggaccttacaacgccgagtgcactgcattcctgtgccctagatgcacgtggggcccactgctcgtggactgtgctggtgcatcacggatggtgcatgggctcgccgtgtctcagcctctgccagcgccaaaacaagccaaagagcctcccaccagagccgggaggaaaaggcccctgcaatgtggtgacacctccccctttcacactggatccatcttgagccacagtcactggattgactttgctgtcaaaactactgacagggagcagcccccgggccgctggctggtgggcccccaatgacacccatgccagagaggtggggatcctgcctaaggttgtctacgggggcacttggaggacctggcgtgctcagacccaacagcaaaggaactagaaagaaggacccagaacggcttgctttcctgcatctctgtgaagcctctctccttggccacagactgaactcgcagggaatgcagcaggaaggaacaaagacaggcaaacggcaacgtagcctgggctcactgtgctggggcacggcgggatcctccacagagaggaggggaccaattctggacagacagatgttgggaggatacagaggagataccctgcaagaccacggagggagcgacacttgaatgtagaataggcagggggccctgccccaccccatccagccagaccccacgctgaccatgcgtcaggggcctagaggtggagttcttagctatccttggctttcagagccagcctggctctgccccctcccccatgggctgtgtcctaaggcccatttgagaagctgaggctagttccagaaaacctctcctgacccctgcctgttggcaggcccactccccagccccagccccttccatggtactgtagcaggggaattccctccccctccttgtgccttctttgtatataggcttctcacggcgaccaataaacagctcccagttt

SEQ ID NO: 390 - DNA, 4911 bp, Homo sapiens
cgaccggtgcgcttgccagatccgccgcgaagccgggatcgaaggcgacagcgcggccaagggggcgcggccgggacaagctgggggccggttgcccggggcagggacggcggcgacccggccgctggggaggcaggaagatagacccacggatcttaggaagggatccgagagcgcagctgtgaaactggctggggctgggggcacgaaaccgatcagcgctacggagcgcagcggccggcgggttccagtgtcctccggcggcgcggggagcaggtgaacaggtcctcacgcccagctccgcgccctcacgcgctctcgccgggaccccgcttccgctggcagccatgggccccggccccagccgcgcgccccgcgccccacgcctgatgctctgtgcgctcgccttgatggtggcggccggcggctgcgtcgtctccgccttcaacctggatacccgattcctggtagtgaaggaggccgggaacccgggcagcctcttcggctactcggtcgccctccatcggcagacagagcggcagcagcgctacctgctcctggctggtgccccccgggagctcgctgtgcccgatggctacaccaaccggactggtgctgtgtacctgtgcccactcactgcccacaaggatgactgtgagcggatgaacatcacagtgaaaaatgaccctggccatcacattattgaggacatgtggcttggagtgactgtggccagccagggccctgcaggcagagttctggtctgtgcccaccgctacacccaggtgctgtggtcagggtcagaagaccagcggcgcatggtgggcaagtgctacgtgcgaggcaatgacctagagctggactccagtgatgactggcagacctaccacaacgagatgtgcaatagcaacacagactacctggagacgggcatgtgccagctgggcaccagcggtggcttcacccagaacactgtgtacttcggcgcccccggtgcctacaactggaaaggaaacagctacatgattcagcgcaaggagtgggacttatctgagtatagttacaaggacccagaggaccaaggaaacctctatattgggtacacgatgcaggtaggcagcttcatcctgcaccccaaaaacatcaccattgtgacaggtgccccacggcaccgacatatgggcgcggtgttcttgctgagccaggaggcaggcggagacctgcggaggaggcaggtgctggagggctcgcaggtgggcgcctattttggcagcgccattgccctggcagacctgaacaatgatgggtggcaggacctcctggtgggcgccccctactacttcgagaggaaagaggaagtagggggtgccatctatgtcttcatgaaccaggcgggaacctccttccctgctcacccctcactccttcttcatggccccagtggctctgcctttggtttatctgtggccagcattggtgacatcaaccaggatggatttcaggatattgctgtgggagctccgtttgaaggcttgggcaaagtgtacatctatcacagtagctctaaggggctccttagacagccccagcaggtaatccatggagagaagctgggactgcctgggttggccaccttcggctattccctcagtgggcagatggatgtggatgagaacttctacccagaccttctagtgggaagcctgtcagaccacattgtgctgctgcgggcccggcccgtcatcaacatcgtccacaagaccttggtgcccaggccagctgtgctggaccctgcactttgcacggccacctcttgtgtgcaagtggagctgtgctttgcttacaaccagagtgccgggaaccccaactacaggcgaaacatcaccctggcctacactctggaggctgacagggaccgccggccgccccggctccgctttgccggcagtgagtccgctgtcttccacggcttcttctccatgcccgagatgcgctgccagaagctggagctgctcctgatggacaacctccgtgacaaactccgccccatcatcatctccatgaactactctttacctttgcggatgcccgatcgcccccggctggggctgcggtccctggacgcctacccgatcctcaaccaggcacaggctctggagaaccacactgaggtccagttccagaaggagtgcgggcctgacaacaagtgtgagagcaacttgcagatgcgggcagccttcgtgtcagagcagcagcagaagctgagcaggctccagtacagcagagacgtccggaaattgctcctgagcatcaacgtgacgaacacccggacctcggagcgctccggggaggacgcccacgaggcgctgctcaccctggtggtgcctcccgccctgctgctgtcctcagtgcgcccccccggggcctgccaagctaatgagaccatcttttgcgagctggggaaccccttcaaacggaaccagaggatggagctgctcatcgcctttgaggtcatcggggtgaccctgcacacaagggaccttcaggtgcagctgcagctctccacgtcgagtcaccaggacaacctgtggcccatgatcctcactctgctggtggactatacactccagacctcgcttagcatggtaaatcaccggctacaaagcttctttggggggacagtgatgggtgagtctggcatgaaaactgtggaggatgtaggaagccccctcaagtatgaattccaggtgggcccaatgggggaggggctggtgggcctggggaccctggtcctaggtctggagtggccctacgaagtcagcaatggcaagtggctgctgtatcccacggagatcaccgtccatggcaatgggtcctggccctgccgaccacctggagaccttatcaaccctctcaacctcactctttctgaccctggggacaggccatcatccccacagcgcaggcggcgacagctggatccagggggaggccagggccccccacctgtcactctggctgctgccaaaaaagccaagtctgagactgtgctgacctgtgccacagggcgtgcccactgtgtgtggctagagtgccccatccctgatgcccccgttgtcaccaacgtgactgtgaaggcacgagtgtggaacagcaccttcatcgaggattacagagactttgaccgagtccgggtaaatggctgggctaccctattcctccgaaccagcatccccaccatcaacatggagaacaagaccacgtggttctctgtggacattgactcggagctggtggaggagctgccggccgaaatcgagctgtggctggtgctggtggccgtgggtgcagggctgctgctgctggggctgatcatcctcctgctgtggaagtgcggcttcttcaagcgagcccgcactcgcgccctgtatgaagctaagaggcagaaggcggagatgaagagccagccgtcagagacagagaggctgaccgacgactactgagggggcagccccccgcccccggcccacctggtgtgacttctttaagcggacccgctattatcagatcatgcccaagtaccacgcagtgcggatccgggaggaggagcgctacccacctccagggagcaccctgcccaccaagaagcactgggtgaccagctggcagactcgggaccaatactactgacgtcctccctgatcccaccccctcctcccccagtgtcccctttcttcctatttatcataagttatgcctctgacagtccacaggggccaccacctttggctggtagcagcaggctcaggcacatacacctcgtcaagagcatgcacatgctgtctggccctggggatcttcccacaggagggccagcgctgtggaccttacaacgccgagtgcactgcattcctgtgccctagatgcacgtggggcccactgctcgtggactgtgctggtgcatcacggatggtgcatgggctcgccgtgtctcagcctctgccagcgccaaaacaagccaaagagcctcccaccagagccgggaggaaaaggcccctgcaatgtggtgacacctccccctttcacactggatccatcttgagccacagtcactggattgactttgctgtcaaaactactgacagggagcagcccccgggccgctggctggtgggcccccaatgacacccatgccagagaggtggggatcctgcctaaggttgtctacgggggcacttggaggacctggcgtgctcagacccaacagcaaaggaactagaaagaaggacccagaacggcttgctttcctgcatctctgtgaagcctctctccttggccacagactgaactcgcagggaatgcagcaggaaggaacaaagacaggcaaacggcaacgtagcctgggctcactgtgctggggcacggcgggatcctccacagagaggaggggaccaattctggacagacagatgttgggaggatacagaggagatgccacttctcactcaccactaccagccagcctcagaaggccccagagagaccctgcaagaccacggagggagcgacacttgaatgtagaataggcagggggccctgccccaccccatccagccagaccccacgctgaccatgcgtcaggggcctagaggtggagttcttagctatccttggctttcagagccagcctggctctgccccctcccccatgggctgtgtcctaaggcccatttgagaagctgaggctagttccagaaaacctctcctgacccctgcctgttggcaggcccactccccagccccagccccttccatggtactgtagcaggggaattccctccccctccttgtgccttctttgtatataggcttctcacggcgaccaataaacagctcccagtttgtatgcag

SEQ ID NO: 391 - DNA, 4854 bp, Homo sapiens
cgaccggtgcgcttgccagatccgccgcgaagccgggatcgaaggcgacagcgcggccaagggggcgcggccgggacaagctgggggccggttgcccggggcagggacggcggcgacccggccgctggggaggcaggaagatagacccacggatcttaggaagggatccgagagcgcagctgtgaaactggctggggctgggggcacgaaaccgatcagcgctacggagcgcagcggccggcgggttccagtgtcctccggcggcgcggggagcaggtgaacaggtcctcacgcccagctccgcgccctcacgcgctctcgccgggaccccgcttccgctggcagccatgggccccggccccagccgcgcgccccgcgccccacgcctgatgctctgtgcgctcgccttgatggtggcggccggcggctgcgtcgtctccgccttcaacctggatacccgattcctggtagtgaaggaggccgggaacccgggcagcctcttcggctactcggtcgccctccatcggcagacagagcggcagcagcgctacctgctcctggctggtgccccccgggagctcgctgtgcccgatggctacaccaaccggactggtgctgtgtacctgtgcccactcactgcccacaaggatgactgtgagcggatgaacatcacagtgaaaaatgaccctggccatcacattattgaggacatgtggcttggagtgactgtggccagccagggccctgcaggcagagttctggtctgtgcccaccgctacacccaggtgctgtggtcagggtcagaagaccagcggcgcatggtgggcaagtgctacgtgcgaggcaatgacctagagctggactccagtgatgactggcagacctaccacaacgagatgtgcaatagcaacacagactacctggagacgggcatgtgccagctgggcaccagcggtggcttcacccagaacactgtgtacttcggcgcccccggtgcctacaactggaaaggaaacagctacatgattcagcgcaaggagtgggacttatctgagtatagttacaaggacccagaggaccaaggaaacctctatattgggtacacgatgcaggtaggcagcttcatcctgcaccccaaaaacatcaccattgtgacaggtgccccacggcaccgacatatgggcgcggtgttcttgctgagccaggaggcaggcggagacctgcggaggaggcaggtgctggagggctcgcaggtgggcgcctattttggcagcgccattgccctggcagacctgaacaatgatgggtggcaggacctcctggtgggcgccccctactacttcgagaggaaagaggaagtagggggtgccatctatgtcttcatgaaccaggcgggaacctccttccctgctcacccctcactccttcttcatggccccagtggctctgcctttggtttatctgtggccagcattggtgacatcaaccaggatggatttcaggatattgctgtgggagctccgtttgaaggcttgggcaaagtgtacatctatcacagtagctctaaggggctccttagacagccccagcaggtaatccatggagagaagctgggactgcctgggttggccaccttcggctattccctcagtgggcagatggatgtggatgagaacttctacccagaccttctagtgggaagcctgtcagaccacattgtgctgctgcgggcccggcccgtcatcaacatcgtccacaagaccttggtgcccaggccagctgtgctggaccctgcactttgcacggccacctcttgtgtgcaagtggagctgtgctttgcttacaaccagagtgccgggaaccccaactacaggcgaaacatcaccctggcctacactctggaggctgacagggaccgccggccgccccggctccgctttgccggcagtgagtccgctgtcttccacggcttcttctccatgcccgagatgcgctgccagaagctggagctgctcctgatggacaacctccgtgacaaactccgccccatcatcatctccatgaactactctttacctttgcggatgcccgatcgcccccggctggggctgcggtccctggacgcctacccgatcctcaaccaggcacaggctctggagaaccacactgaggtccagttccagaaggagtgcgggcctgacaacaagtgtgagagcaacttgcagatgcgggcagccttcgtgtcagagcagcagcagaagctgagcaggctccagtacagcagagacgtccggaaattgctcctgagcatcaacgtgacgaacacccggacctcggagcgctccggggaggacgcccacgaggcgctgctcaccctggtggtgcctcccgccctgctgctgtcctcagtgcgcccccccggggcctgccaagctaatgagaccatcttttgcgagctggggaaccccttcaaacggaaccagaggatggagctgctcatcgcctttgaggtcatcggggtgaccctgcacacaagggaccttcaggtgcagctgcagctctccacgtcgagtcaccaggacaacctgtggcccatgatcctcactctgctggtggactatacactccagacctcgcttagcatggtaaatcaccggctacaaagcttctttggggggacagtgatgggtgagtctggcatgaaaactgtggaggatgtaggaagccccctcaagtatgaattccaggtgggcccaatgggggaggggctggtgggcctggggaccctggtcctaggtctggagtggccctacgaagtcagcaatggcaagtggctgctgtatcccacggagatcaccgtccatggcaatgggtcctggccctgccgaccacctggagaccttatcaaccctctcaacctcactctttctgaccctggggacaggccatcatccccacagcgcaggcggcgacagctggatccagggggaggccagggccccccacctgtcactctggctgctgccaaaaaagccaagtctgagactgtgctgacctgtgccacagggcgtgcccactgtgtgtggctagagtgccccatccctgatgcccccgttgtcaccaacgtgactgtgaaggcacgagtgtggaacagcaccttcatcgaggattacagagactttgaccgagtccgggtaaatggctgggctaccctattcctccgaaccagcatccccaccatcaacatggagaacaagaccacgtggttctctgtggacattgactcggagctggtggaggagctgccggccgaaatcgagctgtggctggtgctggtggccgtgggtgcagggctgctgctgctggggctgatcatcctcctgctgtggaagtgcggcttcttcaagcgagcccgcactcgcgccctgtatgaagctaagaggcagaaggcggagatgaagagccagccgtcagagacagagaggctgaccgacgactactgagggggcagccccccgcccccggcccacctggtgtgacttctttaagcggacccgctattatcagatcatgcccaagtaccacgcagtgcggatccgggaggaggagcgctacccacctccagggagcaccctgcccaccaagaagcactgggtgaccagctggcagactcgggaccaatactactgacgtcctccctgatcccaccccctcctcccccagtgtcccctttcttcctatttatcataagttatgcctctgacagtccacaggggccaccacctttggctggtagcagcaggctcaggcacatacacctcgtcaagagcatgcacatgctgtctggccctggggatcttcccacaggagggccagcgctgtggaccttacaacgccgagtgcactgcattcctgtgccctagatgcacgtggggcccactgctcgtggactgtgctggtgcatcacggatggtgcatgggctcgccgtgtctcagcctctgccagcgccaaaacaagccaaagagcctcccaccagagccgggaggaaaaggcccctgcaatgtggtgacacctccccctttcacactggatccatcttgagccacagtcactggattgactttgctgtcaaaactactgacagggagcagcccccgggccgctggctggtgggcccccaatgacacccatgccagagaggtggggatcctgcctaaggttgtctacgggggcacttggaggacctggcgtgctcagacccaacagcaaaggaactagaaagaaggacccagaacggcttgctttcctgcatctctgtgaagcctctctccttggccacagactgaactcgcagggaatgcagcaggaaggaacaaagacaggcaaacggcaacgtagcctgggctcactgtgctggggcacggcgggatcctccacagagaggaggggaccaattctggacagacagatgttgggaggatacagaggagataccctgcaagaccacggagggagcgacacttgaatgtagaataggcagggggccctgccccaccccatccagccagaccccacgctgaccatgcgtcaggggcctagaggtggagttcttagctatccttggctttcagagccagcctggctctgccccctcccccatgggctgtgtcctaaggcccatttgagaagctgaggctagttccagaaaacctctcctgacccctgcctgttggcaggcccactccccagccccagccccttccatggtactgtagcaggggaattccctccccctccttgtgccttctttgtatataggcttctcacggcgaccaataaacagctcccagttt

SEQ ID NO: 392 - DNA, 4495 bp, Homo sapiens
aggtgaacaggtcctcacgcccagctccgccccctcacgcgctctcgccgggaccccgcttccgctggcagccatgggccccggccccagccgcgcgccccgcgccccacgcctgatgctctgtgcgctcgccttgatggtggcggccggcggctgcgtcgtctccgccttcaacctggatacccgattcctggtagtgaaggaggccgggaacccgggcagcctcttcggctactcggtcgccctccatcggcagacagagcggcagcagcgctacctgctcctggctggtgccccccgggagctcgctgtgcccgatggctacaccaaccggactggtgctgtgtacctgtgcccactcactgcccacaaggatgactgtgagcggatgaacatcacagtgaaaaatgaccctggccatcacattattgaggacatgtggcttggagtgactgtggccagccagggccctgcaggcagagttctggtctgtgcccaccgctacacccaggtgctgtggtcagggtcagaagaccagcggcgcatggtgggcaagtgctacgtgcgaggcaatgacctagagctggactccagtgatgactggcagacctaccacaacgagatgtgcaatagcaacacagactacctggagacgggcatgtgccagctgggcaccagcggtggcttcacccagaacactgtgtacttcggcgcccccggtgcctacaactggaaaggaaacagctacatgattcagcgcaaggagtgggacttatctgagtatagttacaaggacccagaggaccaaggaaacctctatattgggtacacgatgcaggtaggcagcttcatcctgcaccccaaaaacatcaccattgtgacaggtgccccacggcaccgacatatgggcgcggtgttcttgctgagccaggaggcaggcggagacctgcggaggaggcaggtgctggagggctcgcaggtgggcgcctattttggcagcgcaattgccctggcagacctgaacaatgatgggtggcaggacctcctggtgggcgccccctactacttcgagaggaaagaggaagtagggggtgccatctatgtcttcatgaaccaggcgggaacctccttccctgctcacccctcactccttcttcatggccccagtggctctgcctttggtttatctgtggccagcattggtgacatcaaccaggatggatttcaggatattgctgtgggagctccgtttgaaggcttgggcaaagtgtacatctatcacagtagctctaaggggctccttagacagccccagcaggtaatccatggagagaagctgggactgcctgggttggccaccttcggctattccctcagtgggcagatggatgtggatgagaacttctacccagaccttctagtgggaagcctgtcagaccacattgtgctgctgcgggcccggccagtcatcaacatcgtccacaagaccttggtgcccaggccagctgtgctggaccctgcactttgcacggccacctcttgtgtgcaagtggagctgtgctttgcttacaaccagagtgccgggaaccccaactacaggcgaaacatcaccctggcctacactctggaggctgacagggaccgccggccgccccggctccgctttgccggcagtgagtccgctgtcttccacggcttcttctccatgcccgagatgcgctgccagaagctggagctgctcctgatggacaacctccgtgacaaactccgccccatcatcatctccatgaactactctttacctttgcggatgcccgatcgcccccggctggggctgcggtccctggacgcctacccgatcctcaaccaggcacaggctctggagaaccacactgaggtccagttccagaaggagtgcgggcctgacaacaagtgtgagagcaacttgcagatgcgggcagccttcgtgtcagagcagcagcagaagctgagcaggctccagtacagcagagacgtccggaaattgctcctgagcatcaacgtgacgaacacccggacctcggagcgctccggggaggacgcccacgaggcgctgctcaccctggtggtgcctcccgccctgctgctgtcctcagtgcgcccccccggggcctgccaagctaatgagaccatcttttgcgagctggggaaccccttcaaacggaaccagaggatggagctgctcatcgcctttgaggtcatcggggtgaccctgcacacaagggaccttcaggtgcagctgcagctctccacgtcgagtcaccaggacaacctgtggcccatgatcctcactctgctggtggactatacactccagacctcgcttagcatggtaaatcaccggctacaaagcttctttggggggacagtgatgggtgagtctggcatgaaaactgtggaggatgtaggaagccccctcaagtatgaattccaggtgggcccaatgggggaggggctggtgggcctggggaccctggtcctaggtctggagtggccctacgaagtcagcaatggcaagtggctgctgtatcccacggagatcaccgtccatggcaatgggtcctggccctgccgaccacctggagaccttatcaaccctctcaacctcactctttctgaccctggggacaggccatcatccccacagcgcaggcgccgacagctggatccagggggaggccagggccccccacctgtcactctggctgctgccaaaaaagccaagtctgagactgtgctgacctgtgccacagggcgtgcccactgtgtgtggctagagtgccccatccctgatgcccccgttgtcaccaacgtgactgtgaaggcacgagtgtggaacagcaccttcatcgaggattacagagactttgaccgagtccgggtaaatggctgggctaccctattcctccgaaccagcatccccaccatcaacatggagaacaagaccacgtggttctctgtggacattgactcggagctggtggaggagctgccggccgaaatcgagctgtggctggtgctggtggccgtgggtgcagggctgctgctgctggggctgatcatcctcctgctgtggaagtgtgacttctttaagcggacccgctattatcagatcatgcccaagtaccacgcagtgcggatccgggaggaggagcgctacccacctccagggagcaccctgcccaccaagaagcactgggtgaccagctggcagactcgggaccaatactactgacgtcctccctgatcccaccccctcctcccccagtgtcccctttcttcctatttatcataagttatgcctctgacagtccacaggggccaccacctttggctggtagcagcaggctcaggcacatacacctcgtcaagagcatgcacatgctgtctggccctggggatcttcccacaggagggccagcgctgtggaccttacaacgccgagtgcactgcattcctgtgccctagatgcacgtggggcccactgctcgtggactgtgctggtgcatcacggatggtgcatgggctcgccgtgtctcagcctctgccagcgccagcgccaaaacaagccaaagagcctcccaccagagccgggaggaaaaggcccctgcaatgtggtgacacctcccctttcacacctggatccatcttgagagccacagtcactggattgactttgctgtcaaaactactgacagggagcagcccccgggccgctggctggtgggcccccaattgacacccatgccagagaggtggggatcctgcctaaggttgtctacgggggcacttggaggacctggcgtgctcagacccaacagcaaaggaactagaaagaaggacccagaaggcttgctttcctgcatctctgtgaagcctctctccttggccacagactgaactcgcagggagtgcagcaggaaggaacaaagacaggcaaacggcaacgtagcctgggctcactgtgctggggcatggcgggatcctccacagagaggaggggaccaattctggacagacagatgttgggaggatacagaggagatgccacttctcactcaccactaccagccagcctccagaaggccccagagagaccctgcaagaccacggagggagccgacacttgaatgtagtaataggcagggggccctgccaccccatccagccagaccccagctgaaccatgcgtcaggggcctagaggtggagttcttagctatccttggctttctgtgccagcctggctctgcccctcccccatgggctgtgtcctaaggcccatttgagaagctgaggctagttccaaaaacctctcctgacccctgcctgttggcagcccactccccagccccagccccttccatggtactgtagcaggggaattccctccccctccttgtgccttctttgtatataggcttctcaccgcgaccaataaacagctcccagtttgt

SEQ ID NO: 393 - DNA, 2540 bp, Homo sapiens
ggcggccgagccccagctctccgagcaccgggtcggaagccgcgacccgagccgcgcaggaagctgggaccggaacctcggcggacccggccccacccaactcacctgcgcaggtcaccagcaccctcggaacccagaggcccgcgctctgaaggtgacccccctggggaggaaggcgatggcccctgcgaggacgatggcccgcgcccgcctcgccccggccggcatccctgccgtcgccttgtggcttctgtgcacgctcggcctccagggcacccaggccgggccaccgcccgcgccccctgggctgcccgcgggagccgactgcctgaacagctttaccgccggggtgcctggcttcgtgctggacaccaacgcctcggtcagcaacggagctaccttcctggagtcccccaccgtgcgccggggctgggactgcgtgcgcgcctgctgcaccacccagaactgcaacttggcgctagtggagctgcagcccgaccgcggggaggacgccatcgccgcctgcttcctcatcaactgcctctacgagcagaacttcgtgtgcaagttcgcgcccagggagggcttcatcaactacctcacgagggaagtgtaccgctcctaccgccagctgcggacccagggctttggagggtctgggatccccaaggcctgggcaggcatagacttgaaggtacaaccccaggaacccctggtgctgaaggatgtggaaaacacagattggcgcctactgcggggtgacacggatgtcagggtagagaggaaagacccaaaccaggtggaactgtggggactcaaggaaggcacctacctgttccagctgacagtgactagctcagaccacccagaggacacggccaacgtcacagtcactgtgctgtccaccaagcagacagaagactactgcctcgcatccaacaaggtgggtcgctgccggggctctttcccacgctggtactatgaccccacggagcagatctgcaagagtttcgtttatggaggctgcttgggcaacaagaacaactaccttcgggaagaagagtgcattctagcctgtcggggtgtgcaaggcccctccatggaaaggcgccatccagtgtgctctggcacctgtcagcccacccagttccgctgcagcaatggctgctgcatcgacagtttcctggagtgtgacgacacccccaactgccccgacgcctccgacgaggctgcctgtgaaaaatacacgagtggctttgacgagctccagcgcatccatttccccagtgacaaagggcactgcgtggacctgccagacacaggactctgcaaggagagcatcccgcgctggtactacaaccccttcagcgaacactgcgcccgctttacctatggtggttgttatggcaacaagaacaactttgaggaagagcagcagtgcctcgagtcttgtcgcggcatctccaagaaggatgtgtttggcctgaggcgggaaatccccattcccagcacaggctctgtggagatggctgtcgcagtgttcctggtcatctgcattgtggtggtggtagccatcttgggttactgcttcttcaagaaccagagaaaggacttccacggacaccaccaccacccaccacccacccctgccagctccactgtctccactaccgaggacacggagcacctggtctataaccacaccacccggcccctctgagcctgggtctcaccggctctcacctggccctgcttcctgcttgccaaggcagaggcctgggctgggaaaaactttggaaccagactcttgcctgtttcccaggcccactgtgcctcagagaccagggctccagcccctcttggagaagtctcagctaagctcacgtcctgagaaagctcaaaggtttggaaggagcagaaaacccttgggccagaagtaccagactagatggacctgcctgcataggagtttggaggaagttggagttttgtttcctctgttcaaagctgcctgtccctaccccatggtgctaggaagaggagtggggtggtgtcagaccctggaggccccaaccctgtcctcccgagctcctcttccatgctgtgcgcccagggctgggaggaaggacttccctgtgtagtttgtgctgtaaagagttgctttttgtttatttaatgctgtggcatgggtgaagaggaggggaagaggcctgtttggcctctctgtcctctcttcctcttcccccaagattgagctctctgcccttgatcagccccaccctggcctagaccagcagacagagccaggagaggctcagctgcattccgcagcccccacccccaaggttctccaacatcacagcccagcccacccactgggtaataaaagtggtttgtggagtttctggctctgttctgtgggccaggagagggactaggttgctggggggtgatgggaccgtcctgttcagctggttcaggcttcagccaccctgttgagcaggttttcccatcgtctctctcgaaactggcctggcccc

SEQ ID NO: 394 - DNA, 2161 bp, Homo sapiens
ccaccgctgggtccccagcattaagccctggagcatgagcccagtgaactttgaaattcaggaaggaattcacaggaaagctgcggcgaggcgggcagaaaaccacaggcttccaagaaacgcgtgtctgccgccccctcctcccaccctgaggccagtcctagagcgaaggccctcctccgacgtcgtcaccaagcccaagggaagggtggcaggtgctcagcgggcagacgccccgccccgccccgccaggttctgttgggggcgaggcccgcgcaagccccgcctcttccccggcaccaggggcgggcccaggtgcgcccagggccggggagcggccgcgcaggtgcctgccctttgcgcctgcgcccagctcgccctgcctagccaggtgcgccccgccccctgcctgcccggccaccttcgggagccgcttccaataggcgttcgccattggctctggcgacctccgcgcgttgggaggtgtagcgcggctctgaacgcgctgagggccgttgagtgtcgcaggcggcgagggcgcgagtgaggagcagacccaggcatcgcgcgccgagaaggccgggcgtccccacactgaaggtccggaaaggcgacttccgggggctttggcacctggcggaccctcccggagcgtcggcacctgaacgcgaggcgctccattgcgcgtgcgcgttgaggggcttcccgcacctgatcgcgagaccccaacggctggtggcgtcgcctgcgcgtctcggctgagctggccatggcgcagctgtgcgggctgaggcggagccgggcgtttctcgccctgctgggatcgctgctcctctctggggtcctggcggccgaccgagaacgcagcatccacgacttctgcctggtgtcgaaggtggtgggcagatgccgggcctccatgcctaggtggtggtacaatgtcactgacggatcctgccagctgtttgtgtatgggggctgtgacggaaacagcaataattacctgaccaaggaggagtgcctcaagaaatgtgccactgtcacagagaatgccacgggtgacctggccaccagcaggaatgcagcggattcctctgtcccaagtgctcccagaaggcaggattctgaagaccactccagcgatatgttcaactatgaagaatactgcaccgccaacgcagtcactgggccttgccgtgcatccttcccacgctggtactttgacgtggagaggaactcctgcaataacttcatctatggaggctgccggggcaataagaacagctaccgctctgaggaggcctgcatgctccgctgcttccgccagcaggagaatcctcccctgccccttggctcaaaggtggtggttctggcggggctgttcgtgatggtgttgatcctcttcctgggagcctccatggtctacctgatccgggtggcacggaggaaccaggagcgtgccctgcgcaccgtctggagctccggagatgacaaggagcagctggtgaagaacacatatgtcctgtgaccgccctgtcgccaagaggactggggaagggaggggagactatgtgtgagctttttttaaatagagggattgactcggatttgagtgatcattagggctgaggtctgtttctctgggaggtaggacggctgcttcctggtctggcagggatgggtttgctttggaaatcctctaggaggctcctcctcgcatggcctgcagtctggcagcagccccgagttgtttcctcgctgatcgatttctttcctccaggtagagttttctttgcttatgttgaattccattgcctcttttctcatcacagaagtgatgttggaatcgtttcttttgtttgtctgatttatggtttttttaagtataaacaaaagttttttattagcattctgaaagaaggaaagtaaaatgtacaagtttaataaaaaggggccttcccctttagaataaatttcagcatgtgctttctttatgggagtcctaatttcaaccctaccaaaatgatcacaagacactatctgaggtgtcccattctagaaatagacccctcaaaatagcgtctttcagatctttttgaatgaatccacaagatgaaataaatgtcctattactgagtgcccgtgaactttcgccaaacca

SEQ ID NO: 395 - DNA, 1528 bp, Homo sapiens
aaggcggaagcgtgggagggggccgcggtggcccaggacctgctggctctggggtaaaagggtgtgcggtgaggctggtgggtgcaggaaggccaggtctgccccctggacgcggacgaaaagggattcccagtgacatccccgccccctcccgctgcctcggtccccacaggtatggaggtgtcccgggggcggcgtcgcggggcgcctcatgcccagacttcagggggctgtgcgtgcggctggcggcggagctggcgacgctgggcgccctcgagcagcagcgagaggcgggcgcggaggtgctgagcgccggcgacggccctggcgcggaggaggactttctgcggcagctcggcagcctgctgcgggagctgcactgcccggatcgcgcgctctgcggcggggatggcgcggctgcgcttcgggaacccggtgccggactgcgcctgctgcgctttctctgctcagagctccaagccacccgcctcctgtgcctccgctctctgctggatccgagtcctaggccaccccttggtgaaggggtagtggagggagccggcatggtccaagaactggaccttaccctccaagccctggggctgcccagacctgcaccagggacccccgccagccagctgctgcaggagttgcatgctaaggtagagaagctgcagccttctctgcccccagggtccctgcagcccctcctcagctgctcgctagatgcacccagatgggaagcgttggagtctctgtcccaaagcctcagagatcagtaccgctgccgccgctgcctcctcctcaagcgccttgacctcactacatctgctttccactggagtgaccgggcagaggcccaaggagaggccatgagggcagtgctgatcccaattcgagaggttctgaccccagaatcggacatctccattgcacacgttctggctgcccgagccgacctgtcttgtctcgtcccagccaccagcgtggctgtccgcagagggacctgctgtgccatcaacaaggtgcttatgggcaacgttccagaccgggggggccgcccaaatgagctggagcctcccatgcccacctggaggagccgaagagaggatggaggcccccagtgttggggtcgcaagaagaagaagaagaagtaaagggggactggtggtcgggggcggggggtcctccatgagatgctaatgctatcggtaatctctggggagtccgtttaaggctttccttggtatttggcacccaagccccccatctcctattcctgagtccccaaatgccctgctcccattcacgtcaataccaagaaccatgttctccagagaataaatttaatttatgacagctgtaggacctctctctgtgggggccaagtcaggggtgttggggtttgtgaaggggttgggggggtctctgctccctgggactgaatgggcccctgctgctcgaccctcaaagttctttgccctatagcacatctatcctgtgccgtgggcatgggtaaggagacatt

SEQ ID NO: 396 - DNA, 2953 bp, Homo sapiens
atgcttaaatacacgcactggaatgctgtgtctctgacaaacagaaatcaaatcagcacaaaggcagaccaagaggaagtttatcctcccacctacaaattccccagagagctttcatctagaaggtttgactctggccagacaaccagcgagcatcttctcgcaatctgttgcttcttccatggcaaactccagagaattaagaagccaaactcaacatcgccatgggcctcaggacgactaaacagatggggagaggcactaaagctcctggtcaccaagagggacttttcatccccgtggtcccacggtcctcccgcgccccggaggcctgccagccccgctcggacgctcgtttgcccctaacccgccgccatggcttcaccggacgaccctctgcgcgcagatcatatggtaaaggaaccagtggaagacacagaccctagcactttatcctttaatatgggagaagaaaatggctttccagatagcactggagatcctcttccagagatcagcaaggacaactcctgcaaagaaaactgtacttgttcctcctgcttgctccgggcccccaccataagtgacttgctcaatgatcaggacttactagacgtgatcaggataaagctggatccgtgtcacccaacggtgaaaaactggaggaattttgcaagcaaatgggggatgtcctatgacgaattgtgcttcctggagcagaggccacagagccccaccttggagttcttgctccggaacagtcagaggacggtgggccagctgatggagctctgcaggctctaccacagggccgacgtggagaaggttctgcgcaggtgggtggacgaggagtggcccaagcgggagcgtggagacccctccaggcacttctagagctcttcttcttccttcattggcctctccggatgttgaaacaaccacaggtcaagaaggaatgtgaatctgttgttttataagagtttaggacaaggacgtggaacagtggacactggttttccccaaagctggcagttttgtggaggggtagcttgtttcggtggtggatctctgtttatttttgcacatctgttataatttaatattcaaatctggaattaagaaaacatattttctagtatcctctaagggccaaagtcctacaatcggaatggattcatgccacgttgaagataaaattatcctctctctgaaatacggtaaagatttaaataggtcctgagactgttgatagccccagacatacccacagcattatatgtaacatctctcctgatcagtgccattcccacggtttcaaagaaaacagctacaaggaatgcttacctgagtgtctgcagcaccctccacttctctcctaggcaatgagacccagtggctagaaattcaccatgtctattctcaagatccatgccagggagctctttgactctcgtgggaatcccactgttgaggttgatctcttcacctcagaaggtctcttcagagctgctgtgcccagtggtgcttcaactggtatctatgaggtcctagagctccaggacaatgataagactcgctatatggggaagggtgtctcaaagcctgttgagcccatcaataaaactattgcacctgtcctggttagcaagaaactgaacgtcacagaacaagagaagattgacaaacttatgatagagatggatggaacagaaaataaatctaaatttggtgcaaatgccattctgggagtgtccctcgctgcctgcaaagctagtgctgttgagaagggggttcccctgtaccaccacatcgccgacttgtctggcaactccaaagtcatcttgccagtcccggtgttcaatgtcatcaatggcagttctcatgctgtcaccaagctggccatgcaggagttcatggtcctcccagtcggtgcagcaaacttcagggaagccatgcccattggagcggaggtttaccacagcctgaagaatgtcatcaaggagaaatatgggaaagatgccaccggtgtgggggatggaggcgcgtttgctcccaacatcctggagaataaagaaggcctggagctgctgaagactgcgattgggaaagctggctacactgataaggtgatcgtcagcatggacgtagaggcctccgagttcttcaggtctggaaagtatgacctggaattcaagtttctcgacgaccccaccaggtacatctcacctgactgtctggctgacctgtacaagtccttcatcaaaaactacccagtggtgtctactgaagatccctttgaccaggatgactggggagcttggcagaagttcacggccagtgcaggaatccaggtagtggaggatgatctcagagtgaccaacccaaagaggacagcctcggccgtgaatgagaagaagtgcaactgcctcctgctcaaagtgaaccagattcgctctgtgactgagtcccttcaggcgtgcaagctggcccaggccaatggttggtgtgtcatggtgcctcatcattctggggagactgaaaataccttcatcactgacctggtggtggggctgtgacctgggcagctcaagactggtgccccttgctgatctgagcgcttggccaagtacaaccagctcctcagaattgaagaggagctgggcagcaaggctaagtttgccggcaggaacttcagaaaccccccagccaagtaagctgtgggcaggcaagcccttcagtcacctggtggctaattagacccctccccttgtgtcaactccggcagctcaagacccccgagcaacatttgtaggggccgctgctagttagctacccttgcccaccgccgtggagttcgcacctcttccttagaacttctacagaagcaggttgcagtgagccgagattgcgccactgcacaccagtctggagacagagtgagagtccgtcccag

SEQ ID NO: 397 - DNA, 1540 bp, Homo sapiens
aggtcacagagcgcggacacccgcggggcttaacaggcggggctatttttcgaggcggaagaatactcaagttgcaagagtggcaactttttcaagaaggggaaagtcccacttcgggccctttgggtttcttcgcagtcagatccatggccatgcagaaaatctttgcccgggaaatcttggactccaggggcaaccccacggtggaggtggacctgcacacggccaagggccgattccgagcagctgtgcccagtggggcttccacgggtatctatgaggctctggaactaagagacggagacaaaggccgctacctggggaaaggagtcctgaaggctgtggagaacatcaacaatactctgggccctgctctgctgcaaaagaaactaagcgttgtggatcaagaaaaagttgacaaatttatgattgagctagatgggaccgagaataagtccaagtttggggccaatgccatcctgggcgtgtccttggccgtgtgtaaggcgggagcagctgagaagggggtccccctgtaccgccacatcgcagatctcgctgggaaccctgacctcatactcccagtgccagccttcaatgtgatcaacgggggctcccatgctggaaacaagctggccatgcaggagttcatgattctgcctgtgggagccagctccttcaaggaagccatgcgcattggcgccgaggtctaccaccacctcaagggggtcatcaaggccaagtatgggaaggatgccaccaatgtgggtgatgaaggtggcttcgcacccaacatcctggagaacaatgaggccctggagctgctgaagacggccatccaggcggctggttacccagacaaggtggtgatcggcatggatgtggcagcatctgagttctatcgcaatgggaagtacgatcttgacttcaagtcgcctgatgatcccgcacggcacatcactggggagaagctcggagagctgtataagagctttatcaagaactatcctgtggtctccatcgaagacccctttgaccaggatgactgggccacttggacctccttcctctcgggggtgaacatccagattgtgggggatgacttgacagtcaccaaccccaagaggattgcccaggccgttgagaagaaggcctgcaactgtctgctgctgaaggtcaaccagatcggctcggtgaccgaatcgatccaggcgtgcaaactggctcagtctaatggctggggggtgatggtgagccaccgctctggggagactgaggacacattcattgctgaccttgtggtggggctctgcacaggacagatcaagactggcgccccctgccgctcggagcgtctggccaaatacaaccaactcatgaggatcgaggaggctcttggggacaaggcaatctttgctggacgcaagttccgtaacccgaaggccaagtgagaagctggaggctccaggactccactggacagacccaggtcttccagacctgcttcctgaaataaacactggtgccaaccaagacagct

SEQ ID NO: 398 - DNA, 1529 bp, Homo sapiens
aatgcgcagcctgagagggggtgagctgacactgtcccagctgccacctagactcggagctccatccaaacctccagcgaagacatcccaggtcgggtgaatcttccagccctgggggtggaggtagtaaaggccatggccatgcagaaaatctttgcccgggaaatcttggactccaggggcaaccccacggtggaggtggacctgcacacggccaagggccgattccgagcagctgtgcccagtggggcttccacgggtatctatgaggctctggaactaagagacggagacaaaggccgctacctggggaaaggagtcctgaaggctgtggagaacatcaacaatactctgggccctgctctgctgcaaaagaaactaagcgttgtggatcaagaaaaagttgacaaatttatgattgagctagatgggaccgagaataagtccaagtttggggccaatgccatcctgggcgtgtccttggccgtgtgtaaggcgggagcagctgagaagggggtccccctgtaccgccacatcgcagatctcgctgggaaccctgacctcatactcccagtgccagccttcaatgtgatcaacgggggctcccatgctggaaacaagctggccatgcaggagttcatgattctgcctgtgggagccagctccttcaaggaagccatgcgcattggcgccgaggtctaccaccacctcaagggggtcatcaaggccaagtatgggaaggatgccaccaatgtgggtgatgaaggtggcttcgcacccaacatcctggagaacaatgaggccctggagctgctgaagacggccatccaggcggctggttacccagacaaggtggtgatcggcatggatgtggcagcatctgagttctatcgcaatgggaagtacgatcttgacttcaagtcgcctgatgatcccgcacggcacatcactggggagaagctcggagagctgtataagagctttatcaagaactatcctgtggtctccatcgaagacccctttgaccaggatgactgggccacttggacctccttcctctcgggggtgaacatccagattgtgggggatgacttgacagtcaccaaccccaagaggattgcccaggccgttgagaagaaggcctgcaactgtctgctgctgaaggtcaaccagatcggctcggtgaccgaatcgatccaggcgtgcaaactggctcagtctaatggctggggggtgatggtgagccaccgctctggggagactgaggacacattcattgctgaccttgtggtggggctctgcacaggacagatcaagactggcgccccctgccgctcggagcgtctggccaaatacaaccaactcatgaggatcgaggaggctcttggggacaaggcaatctttgctggacgcaagttccgtaacccgaaggccaagtgagaagctggaggctccaggactccactggacagacccaggtcttccagacctgcttcctgaaataaacactggtgccaaccaagacagct

SEQ ID NO: 399 - DNA, 1461 bp, Homo sapiens
tgacactgtcccagctgccacctagactcggagctccatccaaacctccagcgaagacatcccagccatggccatgcagaaaatctttgcccgggaaatcttggactccaggggcaaccccacggtggaggtggacctgcacacggccaagggccgattccgagcagctgtgcccagtggggcttccacgggtatctatgaggctctggaactaagagacggagacaaaggccgctacctggggaaaggagtcctgaaggctgtggagaacatcaacaatactctgggccctgctctgctgcaaaagaaactaagcgttgtggatcaagaaaaagttgacaaatttatgattgagctagatgggaccgagaataagtccaagtttggggccaatgccatcctgggcgtgtccttggccgtgtgtaaggcgggagcagctgagaagggggtccccctgtaccgccacatcgcagatctcgctgggaaccctgacctcatactcccagtgccagccttcaatgtgatcaacgggggctcccatgctggaaacaagctggccatgcaggagttcatgattctgcctgtgggagccagctccttcaaggaagccatgcgcattggcgccgaggtctaccaccacctcaagggggtcatcaaggccaagtatgggaaggatgccaccaatgtgggtgatgaaggtggcttcgcacccaacatcctggagaacaatgaggccctggagctgctgaagacggccatccaggcggctggttacccagacaaggtggtgatcggcatggatgtggcagcatctgagttctatcgcaatgggaagtacgatcttgacttcaagtcgcctgatgatcccgcacggcacatcactggggagaagctcggagagctgtataagagctttatcaagaactatcctgtggtctccatcgaagacccctttgaccaggatgactgggccacttggacctccttcctctcgggggtgaacatccagattgtgggggatgacttgacagtcaccaaccccaagaggattgcccaggccgttgagaagaaggcctgcaactgtctgctgctgaaggtcaaccagatcggctcggtgaccgaatcgatccaggcgtgcaaactggctcagtctaatggctggggggtgatggtgagccaccgctctggggagactgaggacacattcattgctgaccttgtggtggggctctgcacaggacagatcaagactggcgccccctgccgctcggagcgtctggccaaatacaaccaactcatgaggatcgaggaggctcttggggacaaggcaatctttgctggacgcaagttccgtaacccgaaggccaagtgagaagctggaggctccaggactccactggacagacccaggtcttccagacctgcttcctgaaataaacactggtgccaaccaagacagct

SEQ ID NO: 400 - DNA, 1652 bp, Homo sapiens
gcgccgagaatggccgttatgaggaccctaagaggtgagaccctctcgccttctggggtggggggtcccgtcctttcccccactgaggacagaggcccgcccagcgatctgagcatgtgtggacgtcaatcttgcagcccctcttccaggccccctccccagccttgcagggctcaggttacccctggcctttcctaaaggtcactcattcctcttgacgtttgcaaaaggggaatgtaatcctggggtgggccatggccatgcagaaaatctttgcccgggaaatcttggactccaggggcaaccccacggtggaggtggacctgcacacggccaagggccgattccgagcagctgtgcccagtggggcttccacgggtatctatgaggctctggaactaagagacggagacaaaggccgctacctggggaaaggagtcctgaaggctgtggagaacatcaacaatactctgggccctgctctgctgcaaaaggcaaaaactaagcgttgtggatcaagaaaaagttgacaaatttatgattgagctagatgggaccgagaataagtccaagtttggggccaatgccatcctgggcgtgtccttggccgtgtgtaaggcgggagcagctgagaagggggtccccctgtaccgccacatcgcagatctcgctgggaaccctgacctcatactcccagtgccagccttcaatgtgatcaacgggggctcccatgctggaaacaagctggccatgcaggagttcatgattctgcctgtgggagccagctccttcaaggaagccatgcgcattggcgccgaggtctaccaccacctcaagggggtcatcaaggccaagtatgggaaggatgccaccaatgtgggtgatgaaggtggcttcgcacccaacatcctggagaacaatgaggccctggagctgctgaagacggccatccaggcggctggttacccagacaaggtggtgatcggcatggatgtggcagcatctgagttctatcgcaatgggaagtacgatcttgacttcaagtcgcctgatgatcccgcacggcacatcactggggagaagctcggagagctgtataagagctttatcaagaactatcctgtggtctccatcgaagacccctttgaccaggatgactgggccacttggacctccttcctctcgggggtgaacatccagattgtgggggatgacttgacagtcaccaaccccaagaggattgcccaggccgttgagaagaaggcctgcaactgtctgctgctgaaggtcaaccagatcggctcggtgaccgaatcgatccaggcgtgcaaactggctcagtctaatggctggggggtgatggtgagccaccgctctggggagactgaggacacattcattgctgaccttgtggtggggctctgcacaggacagatcaagactggcgccccctgccgctcggagcgtctggccaaatacaaccaactcatgaggatcgaggaggctcttggggacaaggcaatctttgctggacgcaagttccgtaacccgaaggccaagtgagaagctggaggctccaggactccactggacagacccaggtcttccagacctgcttcctgaaataaacactggtgccaaccaagacagct

SEQ ID NO: 401 - DNA, 1656 bp, Homo sapiens
cgggcaactgagggacccactcacgtgcagccgccattcgcgccgcttccagggcaagcacccagtcagggcctctcgctgcgcgccctagaccgcgcccgcccccacccaagtccctccctcagggtccaaaccggagcagtgccccggaccgcgcaggcctcgcagtaccgtgatgttgacgaacgttttcccggggacggcggcccagacggagggcgagtccttgtagcccacgatggccgcgtcctgacagccatggccatgcagaaaatctttgcccgggaaatcttggactccaggggcaaccccacggtggaggtggacctgcacacggccaagggccgattccgagcagctgtgcccagtggggcttccacgggtatctatgaggctctggaactaagagacggagacaaaggccgctacctggggaaaggagtcctgaaggctgtggagaacatcaacaatactctgggccctgctctgctgcaaaaggcaaaaactaagcgttgtggatcaagaaaaagttgacaaatttatgattgagctagatgggaccgagaataagtccaagtttggggccaatgccatcctgggcgtgtccttggccgtgtgtaaggcgggagcagctgagaagggggtccccctgtaccgccacatcgcagatctcgctgggaaccctgacctcatactcccagtgccagccttcaatgtgatcaacgggggctcccatgctggaaacaagctggccatgcaggagttcatgattctgcctgtgggagccagctccttcaaggaagccatgcgcattggcgccgaggtctaccaccacctcaagggggtcatcaaggccaagtatgggaaggatgccaccaatgtgggtgatgaaggtggcttcgcacccaacatcctggagaacaatgaggccctggagctgctgaagacggccatccaggcggctggttacccagacaaggtggtgatcggcatggatgtggcagcatctgagttctatcgcaatgggaagtacgatcttgacttcaagtcgcctgatgatcccgcacggcacatcactggggagaagctcggagagctgtataagagctttatcaagaactatcctgtggtctccatcgaagacccctttgaccaggatgactgggccacttggacctccttcctctcgggggtgaacatccagattgtgggggatgacttgacagtcaccaaccccaagaggattgcccaggccgttgagaagaaggcctgcaactgtctgctgctgaaggtcaaccagatcggctcggtgaccgaatcgatccaggcgtgcaaactggctcagtctaatggctggggggtgatggtgagccaccgctctggggagactgaggacacattcattgctgaccttgtggtggggctctgcacaggacagatcaagactggcgccccctgccgctcggagcgtctggccaaatacaaccaactcatgaggatcgaggaggctcttggggacaaggcaatctttgctggacgcaagttccgtaacccgaaggccaagtgagaagctggaggctccaggactccactggacagacccaggtcttccagacctgcttcctgaaataaacactggtgccaaccaagacagct

SEQ ID NO: 402 - DNA, 2424 bp, Homo sapiens
acccgcgctcgtacgtgcgcctccgccggcagctcctgactcatcgggggctccgggtcacatgcgcccgcgcggccctataggcgcctcctccgcccgccgcccgggagccgcagccgccgccgccactgccactcccgctctctcagcgccgccgtcgccaccgccaccgccaccgccactaccaccgtctgagtctgcagtcccgagatcccagccatcatgtccatagagaagatctgggcccgggagatcctggactcccgcgggaaccccacagtggaggtggatctctatactgccaaaggtcttttccgggctgcagtgcccagtggagcctctacgggcatctatgaggccctggagctgagggatggagacaaacagcgttacttaggcaaaggtgtcctgaaggcagtggaccacatcaactccaccatcgcgccagccctcatcagctcaggtctctctgtggtggagcaagagaaactggacaacctgatgctggagttggatgggactgagaacaaatccaagtttggggccaatgccatcctgggtgtgtctctggccgtgtgtaaggcaggggcagctgagcgggaactgcccctgtatcgccacattgctcagctggccgggaactcagacctcatcctgcctgtgccggccttcaacgtgatcaatggtggctctcatgctggcaacaagctggccatgcaggagttcatgatcctcccagtgggagctgagagctttcgggatgccatgcgactaggtgcagaggtctaccatacactcaagggagtcatcaaggacaaatacggcaaggatgccaccaatgtgggggatgaaggtggctttgcccccaatatcctggagaacagtgaagccttggagctggtgaaggaagccatcgacaaggctggctacacggaaaagatcgttattggcatggatgttgctgcctcagagttttatcgtgatggcaaatatgacttggacttcaagtctcccactgatccttcccgatacatcactggggaccagctgggggcactctaccaggactttgtcagggactatcctgtggtctccattgaggacccatttgaccaggatgattgggctgcctggtccaagttcacagccaatgtagggatccagattgtgggtgatgacctgacagtgaccaacccaaaacgtattgagcgggcagtggaagaaaaggcctgcaactgtctgctgctcaaggtcaaccagatcggctcggtcactgaagccatccaagcgtgcaagctggcccaggagaatggctggggggtcatggtgagtcatcgctcaggagagactgaggacacattcattgctgacctggtggtggggctgtgcacaggccagatcaagactggtgccccgtgccgttctgaacgtctggctaaatacaaccagctcatgagaattgaggaagagctgggggatgaagctcgctttgccggacataacttccgtaatcccagtgtgctgtgattcctctgcttgcctggagacgtggaacctctgtctcatcctcctggaaccttgctgtcctgatctgtgatagttcaccccctgagatcccctgagccccagggtgcccagaacttccctgattgacctgctccgctgctccttggcttacctgacctcttgctgtctctgctcgccctcctttctgtgccctactcattggggttccgcactttccacttcttcctttctctttctctcttccctcagaaactagaaatgtgaatgaggattattataaaagggggtccgtggaagaatgatcagcatctgtgatgggagcgtcagggttggtgtgctgaggtgttagagagggaccatgtgtcacttgtgctttgctcttgtcccacgtgtcttccactttgcatatgagccgtgaactgtgcatagtgctgggatggaggggagtgttgggcatgtgatcacgcctggctaataaggctttagtgtatttatttatttatttattttatttgtttttcattcatcccattaatcatttccccataactcaatggcctaaaactggcctgacttgggggaacgatgtgtctgtatttcatgtggctgtagatcccaagatgactggggtgggaggtcttgctagaatgggaagggtcatagaaagggccttgacatcagttcctttgtgtgtactcactgaagcctgcgttggtccagagcggaggctgtgtgcctgggggagttttcctctatacatctctccccaaccctaggttccctgttcttcctccagctgcaccagagcaacctctcactccccatgccacgttccacagttgccaccacctctgtggcattgaaatgagcacctccattaaagtctgaatcagtgca

SEQ ID NO: 403 - DNA, 2029 bp, Homo sapiens
cgccaccgccactaccaccgtctgagtctgcagtcccgagcctcccgccccgcccattgatctcaggctccacccctctaagcctcttatctttctccttccttcccttccacccgaggagatcccagccatcatgtccatagagaagatctgggcccgggagatcctggactcccgcgggaaccccacagtggaggtggatctctatactgccaaaggtcttttccgggctgcagtgcccagtggagcctctacgggcatctatgaggccctggagctgagggatggagacaaacagcgttacttaggcaaaggtgtcctgaaggcagtggaccacatcaactccaccatcgcgccagccctcatcagctcaggtctctctgtggtggagcaagagaaactggacaacctgatgctggagttggatgggactgagaacaaatccaagtttggggccaatgccatcctgggtgtgtctctggccgtgtgtaaggcaggggcagctgagcgggaactgcccctgtatcgccacattgctcagctggccgggaactcagacctcatcctgcctgtgccggccttcaacgtgatcaatggtggctctcatgctggcaacaagctggccatgcaggagttcatgatcctcccagtgggagctgagagctttcgggatgccatgcgactaggtgcagaggtctaccatacactcaagggagtcatcaaggacaaatacggcaaggatgccaccaatgtgggggatgaaggtggctttgcccccaatatcctggagaacagtgaagccttggagctggtgaaggaagccatcgacaaggctggctacacggaaaagatcgttattggcatggatgttgctgcctcagagttttatcgtgatggcaaatatgacttggacttcaagtctcccactgatccttcccgatacatcactggggaccagctgggggcactctaccaggactttgtcagggactatcctgtggtctccattgaggacccatttgaccaggatgattgggctgcctggtccaagttcacagccaatgtagggatccagattgtgggtgatgacctgacagtgaccaacccaaaacgtattgagcgggcagtggaagaaaaggcctgcaactgtctgctgctcaaggtcaaccagatcggctcggtcactgaagccatccaagcgtgcaagctggcccaggagaatggctggggggtcatggtgagtcatcgctcaggagagactgaggacacattcattgctgacctggtggtggggctgtgcacaggccagatcaagactggtgccccgtgccgttctgaacgtctggctaaatacaaccagctcatgagaattgaggaagagctgggggatgaagctcgctttgccggacataacttccgtaatcccagtgtgctgtgattcctctgcttgcctggagacgtggaacctctgtctcatcctcctggaaccttgctgtcctgatctgtgatagttcaccccctgagatcccctgagccccagggtgcccagaacttccctgattgacctgctccgctgctccttggcttacctgacctcttgctgtctctgctcgccctcctttctgtgccctactcattggggttccgcactttccacttcttcctttctctttctctcttccctcagaaactagaaatgtgaatgaggattattataaaagggggtccgtggaagaatgatcagcatctgtgatgggagcgtcagggttggtgtgctgaggtgttagagagggaccatatgagccgtgaactgtgcatagtgctgggatggaggggagtgttgggcatgtgatcacgcctggctaataaggctttagtgtatttatttatttatttattttatttgtttttcattcatcccattaatcatttccccataactcaatggcatcccaagatgactggggtgggaggtcttgctagaatgggaagggtcatagaaagggccttgacatcagttcctttgtgt

SEQ ID NO: 404 - DNA, 2803 bp, Homo sapiens
cgggtctgatagtccctacctgtcaggactggtgttaggatgagataatgtttgtgaactgtaaactatataaacgtgtgctactgtgagaactggacaaagaagagagggagtgagagaaattaagggagggctggggctgggaaagaacgaaaagggagtcgcgtatagaggagagcgcgacagtcgcgagccacactttgcaatgaaactctttagactttctgccgggagagcggcccagacgcgccaggtctgtagcaggaggccgcgccgagggcgggtccccagaagcctacaggtgagtatcggttctccccttcccggctttcggtccggaggaggcgggagcagcttccctgttctgatcctatcgcgggcggcgcagggccggcttggccttccgtgggacggggaggggggcgggatgtgtcacccaaataccagtggggacggtcggtggtggaaccagccgggcaggtcgggtagagtataagagccggagggagcggccgggcggcagacgcctgcagaccatcccagacgccggagcccgagccccgccgagtccccgcgcctcatccgcccgcgtccggtccgcgttcctccgccccacaatggctcggggccccggcctcgcgccgccaccgctgcggctgccgctgctgctgctggtgctggcggcggtgaccggccacacggccgcgcaggacaactgcacgtgtcccaccaacaagatgaccgtgtgcagccccgacggccccggcggccgctgccagtgccgcgcgctgggctcgggcatggcggtcgactgctccacgctgacctccaagtgtctgctgctcaaggcgcgcatgagcgcccccaagaacgcccgcacgctggtgcggccgagtgagcacgcgctcgtggacaacgatggcctctacgaccccgactgcgaccccgagggccgcttcaaggcgcgccagtgcaaccagacgtcggtgtgctggtgcgtgaactcggtgggcgtgcgccgcacggacaagggcgacctgagcctacgctgcgatgagctggtgcgcacccaccacatcctcattgacctgcgccaccgccccaccgccggcgccttcaaccactcagacctggacgccgagctgaggcggctcttccgcgagcgctatcggctgcaccccaagttcgtggcggccgtgcactacgagcagcccaccatccagatcgagctgcggcagaacacgtctcagaaggccgccggtgaagtggatatcggcgatgccgcctactacttcgagagggacatcaagggcgagtctctattccagggccgcggcggcctggacttgcgcgtgcgcggagaacccctgcaggtggagcgcacgctcatctattacctggacgagattcccccgaagttctccatgaagcgcctcaccgccggcctcatcgccgtcatcgtggtggtcgtggtggccctcgtcgccggcatggccgtcctggtgatcaccaaccggagaaagtcggggaagtacaagaaggtggagatcaaggaactgggggagttgagaaaggaaccgagcttgtaggtacccggcggggcaggggatggggtggggtaccggatttcggtatcgtcccagacccaagtgagtcacgcttcctgattcctcggcgcaaaggagacgtttatcctttcaaattcctgccttccccctcccttttgcgcacacaccaggtttaatagatcctggcctcagggtctcctttctttctcacttctgtcttgaaggaagcatttctaaaatgtatcccctttcggtccaacaacaggaaacctgactggggcagtgaaggaagggatggcacagcgttatgtgtaaaaaacaagtatctgtatgacaacccgggatcgtttgcaagtaactgaatccattgcgacattgtgaaggcttaaatgagtttagatgggaaatagcgttgttatcgccttgggtttaaattatttgatgagttccacttgtatcatggcctacccgaggagaagaggagtttgttaactgggcctatgtagtagcctcatttaccatcgtttgtattactgaccacatatgcttgtcactgggaaagaagcctgtttcagctgcctgaacgcagtttggatgtctttgaggacagacattgcccggaaactcagtctatttattcttcagcttgcccttactgccactgatattggtaatgttcttttttgtaaaatgtttgtacatatgttgtctttgataatgttgctgtaattttttaaaataaaacacgaatttaataaaatatgggaaaggcacaaaccagaagtcggcatttgtgaaaagtccctccagatttctatcacattggtctctaatttcccaagacttgtattttttttttatttcaaattataacacttttttttcccccagaagtgggtgtttcatgttgctactctggtgtgtcctaagatatcctaactggccagtgtaaatgctattctttctaaataagattatttggaaacttccttcaaactgcaggagggtgagcttgagggaggaagctaaaactagctgcttttatgaaaaagagtgccagtctttggtcatctctaaacaaggcttatcaccaatggagacagaaaactctagttcaagagctgtacctcctttgaatcccagccctactttgaaataagtggtactatttccatttagcctttgagcaaatcacttaatctcaaagcgttgtggctctaagattaaacgacttt

SEQ ID NO: 405 - DNA, 2338 bp, Homo sapiens
aggaaaatcagatgttttagttctcttacagaccagcagtaatgttgaaaaatataaaagtagccgtaacagaaaacgaagtgatcatctcagccctcccttggagtggggggatatattgcggagctgagttttaatggctatcagttcttgatcagaaaagtgaaatcactccaactccttccgtattccacggaatatgacccgtcttgaactttgagaaattccccgggtctgtgtgaaattccagttccaaataattcacatgaatggttcacaagaatccaggtaggtttgatctaagtttcgcccgcaccactacagggccgctggggagtcggggccccccagatctgcccgcctcaagtccgcgggacgtcacccccctttccacgctactgcagccgtcgcagtcccacccctttccgggaggtgagggaatgagtgacggctctcccgacgaatggcgaggcggagctgagggggcgtgccccggaggcgggaagtgggtggggctcgccttagctaggcaggaagtcggcgcgggcggcgcggacagtatctgtgggtacccggagcacggagatctcgccggctttacgttcacctcggtgtctgcagcaccctccgcttcctctcctaggcgacgagacccagtggctagaagttcaccatgtctattctcaagatccatgccagggagatctttgactctcgcgggaatcccactgttgaggttgatctcttcacctcaaaaggtctcttcagagctgctgtgcccagtggtgcttcaactggtatctatgaggccctagagctccgggacaatgataagactcgctatatggggaagggtgtctcaaaggctgttgagcacatcaataaaactattgcgcctgccctggttagcaagaaactgaacgtcacagaacaagagaagattgacaaactgatgatcgagatggatggaacagaaaataaatctaagtttggtgcgaacgccattctgggggtgtcccttgccgtctgcaaagctggtgccgttgagaagggggtccccctgtaccgccacatcgctgacttggctggcaactctgaagtcatcctgccagtcccggcgttcaatgtcatcaatggcggttctcatgctggcaacaagctggccatgcaggagttcatgatcctcccagtcggtgcagcaaacttcagggaagccatgcgcattggagcagaggtttaccacaacctgaagaatgtcatcaaggagaaatatgggaaagatgccaccaatgtgggggatgaaggcgggtttgctcccaacatcctggagaataaagaaggcctggagctgctgaagactgctattgggaaagctggctacactgataaggtggtcatcggcatggacgtagcggcctccgagttcttcaggtctgggaagtatgacctggacttcaagtctcccgatgaccccagcaggtacatctcgcctgaccagctggctgacctgtacaagtccttcatcaaggactacccagtggtgtctatcgaagatccctttgaccaggatgactggggagcttggcagaagttcacagccagtgcaggaatccaggtagtgggggatgatctcacagtgaccaacccaaagaggatcgccaaggccgtgaacgagaagtcctgcaactgcctcctgctcaaagtcaaccagattggctccgtgaccgagtctcttcaggcgtgcaagctggcccaggccaatggttggggcgtcatggtgtctcatcgttcgggggagactgaagataccttcatcgctgacctggttgtggggctgtgcactgggcagatcaagactggtgccccttgccgatctgagcgcttggccaagtacaaccagctcctcagaattgaagaggagctgggcagcaaggctaagtttgccggcaggaacttcagaaaccccttggccaagtaagctgtgggcaggcaagcccttcggtcacctgttggctacacagacccctcccctcgtgtcagctcaggcagctcgaggcccccgaccaacacttgcaggggtccctgctagttagcgccccaccgccgtggagttcgtaccgcttccttagaacttctacagaagccaagctccctggagccctgttggcagctctagctttgcagtcgtgtaattggcccaagtcattgtttttctcgcctcactttccaccaagtgtctagagtcatgtgagcctcgtgtcatctccggggtggccacaggctagatccccggtggttttgtgctcaaaataaaaagcctcagtgacccatgagaata

SEQ ID NO: 406 - DNA, 2036 bp, Homo sapiens
agtttcgcccgcaccactacagggccgctggggagtcggggccccccagatctgcccgcctcaagtccgcgggacgtcacccccctttccacgctactgcagccgtcgcagtcccacccctttccgggaggtgagggaatgagtgacggctctcccgacgaatggcgaggcggagctgagggggcgtgccccggaggcgggaagtgggtggggctcgccttagctaggcaggaagtcggcgcgggcggcgcggacagtatctgtgggtacccggagcacggagatctcgccggctttacgttcacctcggtgtctgcagcaccctccgcttcctctcctaggcgacgagacccagtggctagaagttcaccatgtctattctcaagatccatgccagggagatctttgactctcgcgggaatcccactgttgaggttgatctcttcacctcaaaaggtctcttcagagctgctgtgcccagtggtgcttcaactggtatctatgaggccctagagctccgggacaatgataagactcgctatatggggaagggtgtctcaaaggctgttgagcacatcaataaaactattgcgcctgccctggttagcaagaaactgaacgtcacagaacaagagaagattgacaaactgatgatcgagatggatggaacagaaaataaatctaagtttggtgcgaacgccattctgggggtgtcccttgccgtctgcaaagctggtgccgttgagaagggggtccccctgtaccgccacatcgctgacttggctggcaactctgaagtcatcctgccagtcccggcgttcaatgtcatcaatggcggttctcatgctggcaacaagctggccatgcaggagttcatgatcctcccagtcggtgcagcaaacttcagggaagccatgcgcattggagcagaggtttaccacaacctgaagaatgtcatcaaggagaaatatgggaaagatgccaccaatgtgggggatgaaggcgggtttgctcccaacatcctggagaataaagaaggcctggagctgctgaagactgctattgggaaagctggctacactgataaggtggtcatcggcatggacgtagcggcctccgagttcttcaggtctgggaagtatgacctggacttcaagtctcccgatgaccccagcaggtacatctcgcctgaccagctggctgacctgtacaagtccttcatcaaggactacccagtggtgtctatcgaagatccctttgaccaggatgactggggagcttggcagaagttcacagccagtgcaggaatccaggtagtgggggatgatctcacagtgaccaacccaaagaggatcgccaaggccgtgaacgagaagtcctgcaactgcctcctgctcaaagtcaaccagattggctccgtgaccgagtctcttcaggcgtgcaagctggcccaggccaatggttggggcgtcatggtgtctcatcgttcgggggagactgaagataccttcatcgctgacctggttgtggggctgtgcactgggcagatcaagactggtgccccttgccgatctgagcgcttggccaagtacaaccagctcctcagaattgaagaggagctgggcagcaaggctaagtttgccggcaggaacttcagaaaccccttggccaagtaagctgtgggcaggcaagcccttcggtcacctgttggctacacagacccctcccctcgtgtcagctcaggcagctcgaggcccccgaccaacacttgcaggggtccctgctagttagcgccccaccgccgtggagttcgtaccgcttccttagaacttctacagaagccaagctccctggagccctgttggcagctctagctttgcagtcgtgtaattggcccaagtcattgtttttctcgcctcactttccaccaagtgtctagagtcatgtgagcctcgtgtcatctccggggtggccacaggctagatccccggtggttttgtgctcaaaataaaaagcctcagtgacccatgagaata

SEQ ID NO: 407 - DNA, 2243 bp, Homo sapiens
aggaaaatcagatgttttagttctcttacagaccagcagtaatgttgaaaaatataaaagtagccgtaacagaaaacgaagtgatcatctcagccctcccttggagtggggggatatattgcggagctgagttttaatggctatcagttcttgatcagaaaagtgaaatcactccaactccttccgtattccacggaatatgacccgtcttgaactttgagaaattccccgggtctgtgtgaaattccagttccaaataattcacatgaatggttcacaagaatccaggtaggtttgatctaagtttcgcccgcaccactacagggccgctggggagtcggggccccccagatctgcccgcctcaagtccgcgggacgtcacccccctttccacgctactgcagccgtcgcagtcccacccctttccgggaggtgagggaatgagtgacggctctcccgacgaatggcgaggcggagctgagggggcgtgccccggaggcgggaagtgggtggggctcgccttagctaggcaggaagtcggcgcgggcggcgcggacagtatctgtgggtacccggagcacggagatctcgccggctttacgttcacctcggtgtctgcagcaccctccgcttcctctcctaggcgacgagacccagtggctagaagttcaccatgtctattctcaagatccatgccagggagatctttgactctcgcgggaatcccactgttgaggttgatctcttcacctcaaaaggtctcttcagagctgctgtgcccagtggtgcttcaactggtatctatgaggccctagagctccgggacaatgataagactcgctatatggggaagggtgtctcaaaggctgttgagcacatcaataaaactattgcgcctgccctggttagcaagaaactgaacgtcacagaacaagagaagattgacaaactgatgatcgagatggatggaacagaaaataaatctaagtttggtgcgaacgccattctgggggtgtcccttgccgtctgcaaagctggtgccgttgagaagggggtccccctgtaccgccacatcgctgacttggctggcaactctgaagtcatcctgccagtcccggcgttcaatgtcatcaatggcggttctcatgctggcaacaagctggccatgcaggagttcatgatcctcccagtcggtgcagcaaacttcagggaagccatgcgcattggagcagaggtttaccacaacctgaagaatgtcatcaaggagaaatatgggaaagatgccaccaatgtgggggatgaaggcgggtttgctcccaacatcctggagaataaagaaggcctggagctgctgaagactgctattgggaaagctggctacactgataaggtggtcatcggcatggacgtagcggcctccgagttcttcaggtctgggaagtatgacctggacttcaagtctcccgatgaccccagcaggtacatctcgcctgaccagctggctgacctgtacaagtccttcatcaaggactacccagtggtgtctatcgaagatccctttgaccaggatgactggggagcttggcagaagttcacagccagtgcaggaatccaggtagtgggggatgatctcacagtgaccaacccaaagaggatcgccaaggccgtgaacgagaagtcctgcaactgcctcctgctcaaagtcaaccagattggctccgtgaccgagtctcttcaggcgtgcaagctggcccaggccaatggttggggcgtcatggtgtctcatcgttcgggggagactgaagataccttcatcgctgacctggttgtggggctgtgcactgggcagatcaagactggtgccccttgccgatctgagcgcttggccaagtacaaccagctcctcagaattgaagaggagctgggcagcaaggctaagtttgccggcaggaacttcagaaaccccttggccaagtaagctgtgggcaggcaagcccttcggtcacctgttggctacacagacccctcccctcgtgtcagctcaggcagctcgaggcccccgaccaacacttgcaggggtccctgctagttagcgccccaccgccgtggagttcgtaccgcttccttagaacttctacagaagccaagctccctggagcccggcccaagtcattgtttttctcgcctcactttccaccaagtgtctagagtcatgtgagcctcgtgtcatctccggggtggcc

SEQ ID NO: 408 - DNA, 3494 bp, Homo sapiens
cgaggacaggtgtggttttgtccctgtggaacagatggggaaactgaagctccagagcatccgcagtgtcatgcagaagtacctggaggaccggggcgaggtgacctttgagaagatcttttcccagaagctggggtacctgctcttccgagacttctgcctgaaccacctggaggaggccaggcccttggtggaattctatgaggagatcaagaagtacgagaagctggagacggaggaggagcgtgtggcccgcagccgggagatcttcgactcatacatcatgaaggagctgctggcctgctcgcatcccttctcgaagagtgccactgagcatgtccaaggccacctggggaagaagcaggtgcctccggatctcttccagccatacatcgaagagatttgtcaaaacctccgaggggacgtgttccagaaattcattgagagcgataagttcacacggttttgccagtggaagaatgtggagctcaacatccacctgaccatgaatgacttcagcgtgcatcgcatcattgggcgcgggggctttggcgaggtctatgggtgccggaaggctgacacaggcaagatgtacgccatgaagtgcctggacaaaaagcgcatcaagatgaagcagggggagaccctggccctgaacgagcgcatcatgctctcgctcgtcagcactggggactgcccattcattgtctgcatgtcatacgcgttccacacgccagacaagctcagcttcatcctggacctcatgaacggtggggacctgcactaccacctctcccagcacggggtcttctcagaggctgacatgcgcttctatgcggccgagatcatcctgggcctggagcacatgcacaaccgcttcgtggtctaccgggacctgaagccagccaacatccttctggacgagcatggccacgtgcggatctcggacctgggcctggcctgtgacttctccaagaagaagccccatgccagcgtgggcacccacgggtacatggctccggaggtcctgcagaagggcgtggcctacgacagcagtgccgactggttctctctggggtgcatgctcttcaagttgctgcgggggcacagccccttccggcagcacaagaccaaagacaagcatgagatcgaccgcatgacgctgacgatggccgtggagctgcccgactccttctcccctgaactacgctccctgctggaggggttgctgcagagggatgtcaaccggagattgggctgcctgggccgaggggctcaggaggtgaaagagagcccctttttccgctccctggactggcagatggtcttcttgcagaagtaccctcccccgctgatccccccacgaggggaggtgaacgcggccgacgccttcgacattggctccttcgatgaggaggacacaaaaggaatcaagttactggacagtgatcaggagctctaccgcaacttccccctcaccatctcggagcggtggcagcaggaggtggcagagactgtcttcgacaccatcaacgctgagacagaccggctggaggctcgcaagaaagccaagaacaagcagctgggccatgaggaagactacgccctgggcaaggactgcatcatgcatggctacatgtccaagatgggcaaccccttcctgacccagtggcagcggcggtacttctacctgttccccaaccgcctcgagtggcggggcgagggcgaggccccgcagagcctgctgaccatggaggagatccagtcggtggaggagacgcagatcaaggagcgcaagtgcctgctcctcaagatccgcggtgggaaacagttcattttgcagtgcgatagcgaccctgagctggtgcagtggaagaaggagctgcgcgacgcctaccgcgaggcccagcagctggtgcagcgggtgcccaagatgaagaacaagccgcgctcgcccgtggtggagctgagcaaggtgccgctggtccagcgcggcagtgccaacggcctctgacccgcccacccgccttttataaacctctaatttattttgtcgaatttttattatttgttttcccgccaagcggaaaaggttttattttgtaattattgtgatttcccgtggccccagcctggcccagctcccccgggaggggcccgcttgcctcggctcctgctgcaccaacccagccgctgcccggcgccctctgtcctgacttcaggggctgcccgctcccagtgtcttcctgtgggggaagagcacagccctcccgccccttccccgagggatgatgccacaccaagctgtgccaccctgggctctgtgggctgcactctgtgcccatgggcactgctgggtggcccatcccccctcaccaggggcaggcacagcacagggatccgacttgaattttcccactgcaccccctcctgctgcagaggggcaggccctgcactgtcctgctccacagtgttggcgagaggaggggcccgttgtctccctggccctcaaggcctcccacagtgactcgggctcctgtgcccttattcaggaaaagcctctgtgtcactggctgcctccactcccacttccctgacactgcggggcttggctgagagagtggcattggcagcaggtgctgctaccctccctgctgtcccctcttgccccaacccccagcacccgggctcagggaccacagcaaggcacctgcaggttgggccatactggcctcgcctggcctgaggtctcgctgatgctgggctgggtgcgaccccatctgcccaggacggggccggccaggtgggcgggcagcacagcaaggaggctggctggggcctatcagtgtgccccccatcctggcccatcagtgtacccccgcccaggctggccagccccacagcccacgtcctgtcagtgccgccgcctcgcccaccgcatgccccctcgtgccagtcgcgctgcctgtgtggtgtcgcgccttctcccccccggggctgggttggcgcaccctcccctcccgtctactcattccccggggcgtttctttgccgatttttgaatgtgattttaaagagtgaaaaatgagactatgcgtttttataaaaaatggtgcctgattcggctgtctcagactctttttgtacctggtgaccccttttcagcttctgctgggctggggcctgatggggagggtctcggtggtaccaggtctcctccaccgccatggcttccaaggtggtctgctcgggcccaggccatcttccaggtggggtgaggcagtgggtcccacttcccctcctacccctcccagctgacagtcctctccacctagtggctgtccagtgcccattcctcaccttttcccggggaggagagagcagcttctgccacttcccaggtaagcaggaggaggtgccaacagtgttaggcctggcacagtgtctgggctgactgggaccgtctcaggcccacagaacacccctgcacagca

SEQ ID NO: 409 - DNA, 3466 bp, Homo sapiens
cgaggacaggtgtggttttgtccctgtggaacagatggggaaactgaagctccagagcatccgcagtgtcatgcagaagtacctggaggaccggggcgaggtgacctttgagaagatcttttcccagaagctggggtacctgctcttccgagacttctgcctgaaccacctggaggaggccaggcccttggtggaattctatgaggagatcaagaagtacgagaagctggagacggaggaggagcgtgtggcccgcagccgggagatcttcgactcatacatcatgaaggagctgctggcctgctcgcatcccttctcgaagagtgccactgagcatgtccaaggccacctggggaagaagcaggtgcctccggatctcttccagccatacatcgaagagatttgtcaaaacctccgaggggacgtgttccagaaattcattgagagcgataagttcacacggttttgccagtggaagaatgtggagctcaacatccacctgaccatgaatgacttcagcgtgcatcgcatcattgggcgcgggggctttggcgaggtctatgggtgccggaaggctgacacaggcaagatgtacgccatgaagtgcctggacaaaaagcgcatcaagatgaagcagggggagaccctggccctgaacgagcgcatcatgctctcgctcgtcagcactggggactgcccattcattgtctgcatgtcatacgcgttccacacgccagacaagctcagcttcatcctggacctcatgaacggtggggacctgcactaccacctctcccagcacggggtcttctcagaggctgacatgcgcttctatgcggccgagatcatcctgggcctggagcacatgcacaaccgcttcgtggtctaccgggacctgaagccagccaacatccttctggacgagcatggccacgtgcggatctcggacctgggcctggcctgtgacttctccaagaagaagccccatgccagcgtgggcacccacgggtacatggctccggaggtcctgcagaagggcgtggcctacgacagcagtgccgactggttctctctggggtgcatgctcttcaagttgctgcgggggcacagccccttccggcagcacaagaccaaagacaagcatgagatcgaccgcatgacgctgacgatggccgtggagctgcccgactccttctcccctgaactacgctccctgctggaggggttgctgcagagggatgtcaaccggagattgggctgcctgggccgaggggctcaggaggtgaaagagagcccctttttccgctccctggactggcagatggtcttcttgcagaagtaccctcccccgctgatccccccacgaggggaggtgaacgcggccgacgccttcgacattggctccttcgatgaggaggacacaaaaggaatcaagttactggacagtgatcaggagctctaccgcaacttccccctcaccatctcggagcggtggcagcaggaggtggcagagactgtcttcgacaccatcaacgctgagacagaccggctggaggctcgcaagaaagccaagaacaagcagctgggccatgaggaagactacgccctgggcaaggactgcatcatgcatggctacatgtccaagatgggcaaccccttcctgacccagtggcagcggcggtacttctacctgttccccaaccgcctcgagtggcggggcgagggcgaggccccgcagagcctgctgaccatggaggagatccagtcggtggaggagacgcagatcaaggagcgcaagtgcctgctcctcaagatccgcggtgggaaacagttcattttgcagtgcgatagcgaccctgagctggtgcagtggaagaaggagctgcgcgacgcctaccgcgaggcccagcagctggtgcagcgggtgcccaagatgaagaacaagccgcgctcgcccgtggtggagctgagcaaggtgccgctggtccagcgcggcagtgccaacggcctctgacccgcccacccgccttttataaacctctaatttattttgtcgaatttttattatttgttttcccgccaagcggaaaaggttttattttgtaattattgtgatttcccgtggccccagcctggcccagctcccccgggaggggcccgcttgcctcggctcctgctgcaccaacccagccgctgcccggcgccctctgtcctgacttcaggggctgcccgctcccagtgtcttcctgtgggggaagagcacagccctcccgccccttccccgagggatgatgccacaccaagctgtgccaccctgggctctgtgggctgcactctgtgcccatgggcactgctgggtggcccatcccccctcaccaggggcaggcacagcacagggatccgacttgaattttcccactgcaccccctcctgctgcagaggggcaggccctgcactgtcctgctccacagtgttggcgagaggaggggcccgttgtctccctggccctcaaggcctcccacagtgactcgggctcctgtgcccttattcaggaaaagcctctgtgtcactggctgcctccactcccacttccctgacactgcggggcttggctgagagagtggcattggcagcaggtgctgctaccctccctgctgtcccctcttgccccaacccccagcacccgggctcagggaccacagcaaggcacctgcaggttgggccatactggcctcgcctggcctgaggtctcgctgatgctgggctgggtgcgaccccatctgcccaggacggggccggccaggtgggcgggcagcacagcaaggaggctggctggggcctatcagtgtgccccccatcctggcccatcagtgtacccccgcccaggctgtgccgccgcctcgcccaccgcatgccccctcgtgccagtcgcgctgcctgtgtggtgtcgcgccttctcccccccggggctgggttggcgcaccctcccctcccgtctactcattccccggggcgtttctttgccgatttttgaatgtgattttaaagagtgaaaaatgagactatgcgtttttataaaaaatggtgcctgattcggctgtctcagactctttttgtacctggtgaccccttttcagcttctgctgggctggggcctgatggggagggtctcggtggtaccaggtctcctccaccgccatggcttccaaggtggtctgctcgggcccaggccatcttccaggtggggtgaggcagtgggtcccacttcccctcctacccctcccagctgacagtcctctccacctagtggctgtccagtgcccattcctcaccttttcccggggaggagagagcagcttctgccacttcccaggtaagcaggaggaggtgccaacagtgttaggcctggcacagtgtctgggctgactgggaccgtctcaggcccacagaacacccctgcacagca

SEQ ID NO: 410 - DNA, 3437 bp, Homo sapiens
catccgcagtgtcatgcagaagtacctggaggaccggggcgaggtgacctttgagaagatcttttcccagaagctggggtacctgctcttccgagacttctgcctgaaccacctggaggaggccaggcccttggtggaattctatgaggagatcaagaagtacgagaagctggagacggaggaggagcgtgtggcccgcagccgggagatcttcgactcatacatcatgaaggagctgctggcctgctcgcatcccttctcgaagagtgccactgagcatgtccaaggccacctggggaagaagcaggtgcctccggatctcttccagccatacatcgaagagatttgtcaaaacctccgaggggacgtgttccagaaattcattgagagcgataagttcacacggttttgccagtggaagaatgtggagctcaacatccacctgaccatgaatgacttcagcgtgcatcgcatcattgggcgcgggggctttggcgaggtctatgggtgccggaaggctgacacaggcaagatgtacgccatgaagtgcctggacaaaaagcgcatcaagatgaagcagggggagaccctggccctgaacgagcgcatcatgctctcgctcgtcagcactggggactgcccattcattgtctgcatgtcatacgcgttccacacgccagacaagctcagcttcatcctggacctcatgaacggtggggacctgcactaccacctctcccagcacggggtcttctcagaggctgacatgcgcttctatgcggccgagatcatcctgggcctggagcacatgcacaaccgcttcgtggtctaccgggacctgaagccagccaacatccttctggacgagcatggccacgtgcggatctcggacctgggcctggcctgtgacttctccaagaagaagccccatgccagcgtgggcacccacgggtacatggctccggaggtcctgcagaagggcgtggcctacgacagcagtgccgactggttctctctggggtgcatgctcttcaagttgctgcgggggcacagccccttccggcagcacaagaccaaagacaagcatgagatcgaccgcatgacgctgacgatggccgtggagctgcccgactccttctcccctgaactacgctccctgctggaggggttgctgcagagggatgtcaaccggagattgggctgcctgggccgaggggctcaggaggtgaaagagagcccctttttccgctccctggactggcagatggtcttcttgcagaagtaccctcccccgctgatccccccacgaggggaggtgaacgcggccgacgccttcgacattggctccttcgatgaggaggacacaaaaggaatcaagttactggacagtgatcaggagctctaccgcaacttccccctcaccatctcggagcggtggcagcaggaggtggcagagactgtcttcgacaccatcaacgctgagacagaccggctggaggctcgcaagaaagccaagaacaagcagctgggccatgaggaagactacgccctgggcaaggactgcatcatgcatggctacatgtccaagatgggcaaccccttcctgacccagtggcagcggcggtacttctacctgttccccaaccgcctcgagtggcggggcgagggcgaggccccgcagagcctgctgaccatggaggagatccagtcggtggaggagacgcagatcaaggagcgcaagtgcctgctcctcaagatccgcggtgggaaacagttcattttgcagtgcgatagcgaccctgagctggtgcagtggaagaaggagctgcgcgacgcctaccgcgaggcccagcagctggtgcagcgggtgcccaagatgaagaacaagccgcgctcgcccgtggtggagctgagcaaggtgccgctggtccagcgcggcagtgccaacggcctctgacccgcccacccgccttttataaacctctaatttattttgtcgaatttttattatttgttttcccgccaagcggaaaaggttttattttgtaattattgtgatttcccgtggccccagcctggcccagctcccccgggaggggcccgcttgcctcggctcctgctgcaccaacccagccgctgcccggcgccctctgtcctgacttcaggggctgcccgctcccagtgtcttcctgtgggggaagagcacagccctcccgccccttccccgagggatgatgccacaccaagctgtgccaccctgggctctgtgggctgcactctgtgcccatgggcactgctgggtggcccatcccccctcaccaggggcaggcacagcacagggatccgacttgaattttcccactgcaccccctcctgctgcagaggggcaggccctgcactgtcctgctccacagtgttggcgagaggaggggcccgttgtctccctggccctcaaggcctcccacagtgactcgggctcctgtgcccttattcaggaaaagcctctgtgtcactggctgcctccactcccacttccctgacactgcggggcttggctgagagagtggcattggcagcaggtgctgctaccctccctgctgtcccctcttgccccaacccccagcacccgggctcagggaccacagcaaggcacctgcaggttgggccatactggcctcgcctggcctgaggtctcgctgatgctgggctgggtgcgaccccatctgcccaggacggggccggccaggtgggcgggcagcacagcaaggaggctggctggggcctatcagtgtgccccccatcctggcccatcagtgtacccccgcccaggctggccagccccacagcccacgtcctgtcagtgccgccgcctcgcccaccgcatgccccctcgtgccagtcgcgctgcctgtgtggtgtcgcgccttctcccccccggggctgggttggcgcaccctcccctcccgtctactcattccccggggcgtttctttgccgatttttgaatgtgattttaaagagtgaaaaatgagactatgcgtttttataaaaaatggtgcctgattcggctgtctcagactctttttgtacctggtgaccccttttcagcttctgctgggctggggcctgatggggagggtctcggtggtaccaggtctcctccaccgccatggcttccaaggtggtctgctcgggcccaggccatcttccaggtggggtgaggcagtgggtcccacttcccctcctacccctcccagctgacagtcctctccacctagtggctgtccagtgcccattcctcaccttttcccggggaggagagagcagcttctgccacttcccaggtaagcaggaggaggtgccaacagtgttaggcctggcacagtgtctgggctgactgggaccgtctcaggcccacagaacacccctgcacagca

SEQ ID NO: 411 - DNA, 441 bp, Homo sapiens
atgcccgatgctgccttaagccttatgaggtcaccacggaactgcagggaatctttgccggtgctactgtttttatgcttgcttctgaagacgtgtgaacctaaaactgcaaatgcctttaaaccaaatatcctactgatcatggcggatgatctaggcattggggatctcggttgctatgggaacaatacactgagaatgccaaatattgaccagcttgcagaggaaggtgtgaggctcactcagcacctggcggccaccctgctctgcaccccaagccgagctgcattcctcatggggagacattctttcaggtcaggcatggacgccagcaatggatactgggcccttcagtggaatgcaggctcaggtggctccctgagaacgaaaccacttttgcaagaatcttgcagcaccgcgactatgcaactggcctcataa

SEQ ID NO: 412 - DNA, 1472 bp, Homo sapiens
aaggtcaccccatctctgatcttcgccatcacaattgctacaatcggctctttccaatttggctacaacactggggtcatcaatgctcctgagatgatcataagggaatttatcaacactttgaaggacaaggcaaatacccctccctctgagatgttgtgcttgtccctttggtgcttgtctatggccatattctccattggttgtatgattagctccttttctgttggactgtttgtcaacagctttgacaggcgtaattcaatgcttactgtcaacctgttggctgccactggtggctgccttatgggactgtgtaaagtagctgagttggttgaaatactgatcctggcctacttggttattggcctcttctgcagactctgcacaggttttgtgcccacgtacatcggagacatctcacctattggcctgcaaggtgtctttggcactctcaaccagctgggcattgttgttggaattctggtggcccagatctttgatctggaattcatcctggggtctgaagacctatggcctgtgctattaggctttcccatctctcctgctatgctacaaagtgcagcccttcctttttgccctgaaagtcccagattcttgctcattaacagaaaagaagaggagaatgctaaggagatcctccagtggttgtggggcacccaggatgtatcccaagacatccaggagatgaaagatgagagtgcaaggatggcacaagaaaagcaagtcactgtgctggagctctttagagtatccagctaccgacagcccatcatcatttccatcatgctccagctctctcagcagctctctgtaatcaatactgtgttctattactcaacaggaatctttaagggtgcaggtgttcaagagcccatctgtgtcaccattggtgtgggtgtggttaatactatcttcactatagtttccctatttctagtggaaagggcagtaagaaggactctacatatgataggccttggagggatggctttttgttccatcctcatgtctgtttgtttgttattgaaggatgagtgtaatgggataagctttgtctgtattggggctatcttggtctttgtggtcttctttgaaattgggccagaccacattccctggtttattgtggctgaactcttcagccagggccctggcccagctgtgatggcagtggccggctgctccacctggacctccaacttcctagtcagattgcttttcccttctgctgcttactatttaggagcctacgtttttattatcttcaccgacttcctcattaccttcttgatctttaccttcttcaaagtccctgagatgtgttacaggactttcaaggatatcacataggcctttgaggggcaggcacacgatgcaaatagatctggaaggactgtgtcatggagatgaacagtatccagcctgctaaggagaccaccaccaatgtc

SEQ ID NO: 413 - DNA, 2742 bp, Homo sapiens
ctgagagggcggaagccttggcactagcggcgcccgggcgcggagtgcgcagggcaaggtcctgcgctctgggccagcgctcggccatgcgatccgccgcgcggaggggacgcgccgcgcccgccgccagggactctttgccggtgctactgtttttatgcttgcttctgaagacgtgtgaacctaaaactgcaaatgcctttaaaccaaatatcctactgatcatggcggatgatctaggcactggggatctcggttgctacgggaacaatacactgagaacgccgaatattgaccagcttgcagaggaaggtgtgaggctcactcagcacctggcggccgccccgctctgcaccccaagccgagctgcattcctcacagggagacattccttcagatcaggcatggacgccagcaatggataccgggcccttcagtggaacgcaggctcaggtggactccctgagaacgaaaccacttttgcaagaatcttgcagcagcatggctatgcaaccggcctcataggaaaatggcaccagggtgtgaattgtgcatcccgcggggatcactgccaccaccccctgaaccacggatttgactatttctacggcatgcccttcacgctcacaaacgactgtgacccaggcaggccccccgaagtggacgccgccctgagggcgcagctctggggttacacccagttcctggcgctggggattctcaccctggctgccggccagacctgcggtttcttctgtgtctccgcgagagcagtcaccggcatggccggcgtgggctgcctgtttttcatctcttggtactcctccttcgggtttgtgcgacgctggaactgtatcctgatgagaaaccatgacgtcacggagcaacccatggttctggagaaaacagcgagtcttatgctaaaggaagctgtttcctatattgaaagacacaagcatgggccatttctcctcttcctttctttgctgcatgtgcacattccccttgtgaccacgagtgcattcctggggaaaagtcagcatggcttatatggtgataatgtggaggagatggactggctcataggtaaggttcttaatgccatcgaagacaatggtttaaagaactcaacattcacgtatttcacctctgaccatggaggacatttagaggcaagagatggacacagccagttagggggatggaacggaatttacaaaggtgggaagggcatgggaggatgggaaggtgggatccgcgtgcccgggatcttccactggccgggggtgctcccggccggccgagtgattggagagcccacgagcctgatggacgtgttccctactgtggtccagctggtgggtggcgaggtgccccaggacagggtgattgatggccacagcctggtacccttgctgcagggagctgaggcacgctcggcacatgagttcctgtttcattactgtgggcagcatcttcacgcagcacgctggcaccagaaggacagtggaagcgtctggaaggttcattacacgaccccgcagttccaccccgagggagcgggggcctgctacggccgaggcgtctgcccatgctccggggagggcgtgacccatcacagaccccctttgctctttgacctctccagggacccctccgaggcacggcccctgacccccgactccgagcccctgtaccacgccgtgatagcaagggtaggtgccgcggtgtcggagcatcggcagaccctgagtcctgtgccccagcagttttccatgagcaacatcctgtggaagccgtggctgcagccgtgctgcggacatttcccgttctgttcatgccacgaggatggggatggcaccccctgaatgccaggactgtgagagaggatccaggagagcctgactgcgttgcaaacaaaattctccaagcttggttctatcttcagcttccctttttgcaaggaacatgccctggactgagagtgggtccccactttctttctttctttctttcttttttgagacagagtgtcgctctgtccctcaggctggaatgcaatggcacgatctctgctcactgcaacctccgcctcccgggttcaagcgattttcctgcctcagcctcctgagtacccaggattacaggcaccaggcacctgccaccatgcctagctaatttttgtagttttagtagagacagggtttcaccatgttgcccaggctggtctcgcactcctgacctcaagtcatccacctgcctcagcctcccaaagtgctgggattacaggcacgagccactgcgcccatgtagggtttccctttcctgatttgtgaaataagactgtcccagtaggcacccactgatgcctcctcttcctcttctaaatctcagggttcgtcattgtgccaatgcccgatgttttcacccctccgtcttaaagcattgttgcaatttcatcacctagatgacataacagccttacaaaaggacagggaggagtgtctgttcctactctcacatagcggaggaaagttagagcctctcagtctctgtttatgaggactcattaatctcaaataattgatgcatttttcatacattagggtctctgtccatgtgtcttcctgatattgttatagaaatggcttcaggctgctggtaacagatgctgcggaaaaagaatgccttaaacaaagccaggcacggtgactcacacctgtaatcccagcactttgggag

SEQ ID NO: 414 - DNA, 5028 bp, Homo sapiens
ctgagagggcggaagccttggcactagcggcgcccgggcgcggagtgcgcagggcaaggtcctgcgctctgggccagcgctcggccatgcgatccgccgcgcggaggggacgcgccgcgcccgccgccagggactctttgccggtgctactgtttttatgcttgcttctgaagacgtgtgaacctaaaactgcaaatgcctttaaaccaaatatcctactgatcatggcggatgatctaggcactggggatctcggttgctacgggaacaatacactgagaacgccgaatattgaccagcttgcagaggaaggtgtgaggctcactcagcacctggcggccgccccgctctgcaccccaagccgagctgcattcctcacagggagacattccttcagatcaggcatggacgccagcaatggataccgggcccttcagtggaacgcaggctcaggtggactccctgagaacgaaaccacttttgcaagaatcttgcagcagcatggctatgcaaccggcctcataggaaaatggcaccagggtgtgaattgtgcatcccgcggggatcactgccaccaccccctgaaccacggatttgactatttctacggcatgcccttcacgctcacaaacgactgtgacccaggcaggccccccgaagtggacgccgccctgagggcgcagctctggggttacacccagttcctggcgctggggattctcaccctggctgccggccagacctgcggtttcttctgtgtctccgcgagagcagtcaccggcatggccggcgtgggctgcctgtttttcatctcttggtactcctccttcgggtttgtgcgacgctggaactgtatcctgatgagaaaccatgacgtcacggagcaacccatggttctggagaaaacagcgagtcttatgctaaaggaagctgtttcctatattgaaagacacaagcatgggccatttctcctcttcctttctttgctgcatgtgcacattccccttgtgaccacgagtgcattcctggggaaaagtcagcatggcttatatggtgataatgtggaggagatggactggctcataggtaaggttcttaatgccatcgaagacaatggtttaaagaactcaacattcacgtatttcacctctgaccatggaggacatttagaggcaagagatggacacagccagttagggggatggaacggaatttacaaaggtgggaagggcatgggaggatgggaaggtgggatccgcgtgcccgggatcttccactggccgggggtgctcccggccggccgagtgattggagagcccacgagcctgatggacgtgttccctactgtggtccagctggtgggtggcgaggtgccccaggacagggtgattgatggccacagcctggtacccttgctgcagggagctgaggcacgctcggcacatgagttcctgtttcattactgtgggcagcatcttcacgcagcacgctggcaccagaaggacagtggaagcgtctggaaggttcattacacgaccccgcagttccaccccgagggagcgggggcctgctacggccgaggcgtctgcccatgctccggggagggcgtgacccatcacagaccccctttgctctttgacctctccagggacccctccgaggcacggcccctgacccccgactccgagcccctgtaccacgccgtgatagcaagggtaggtgccgcggtgtcggagcatcggcagaccctgagtcctgtgccccagcagttttccatgagcaacatcctgtggaagccgtggctgcagccgtgctgcggacatttcccgttctgttcatgccacgaggatggggatggcaccccctgaatgccaggactgtgagagaggatccaggagagcctgactgcgttgcaaacaaaattctccaagcttggttctatcttcagcttccctttttgcaaggaacatgccctggactgagagtgggtccccactttctttctttctttctttcttttttgagacagagtgtcgctctgtccctcaggctggaatgcaatggcacgatctctgctcactgcaacctccgcctcccgggttcaagcgattttcctgcctcagcctcctgagtacccaggattacaggcaccaggcacctgccaccatgcctagctaatttttgtagttttagtagagacagggtttcaccatgttgcccaggctggtctcgcactcctgacctcaagtcatccacctgcctcagcctcccaaagtgctgggattacaggcacgagccactgcgcccatgtagggtttccctttcctgatttgtgaaataagactgtcccagtaggcacccactgatgcctcctcttcctcttctaaatctcagggttcgtcattgtgccaatgcccgatgttttcacccctccgtcttaaagcattgttgcaatttcatcacctagatgacataacagccttacaaaaggacagggaggagtgtctgttcctactctcacatagcggaggaaagttagagcctctcagtctctgtttatgaggactcattaatctcaaataattgatgcatttttcatacattagggtctctgtccatgtgtcttcctgatattgttatagaaatggcttcaggctgctggtaacagatgctgcggaaaaagaatgccttaaacaaagccaggcacggtgactcacacctgtaatcccagcactttgggaggctgaggcgggaggattatttgagcctgggaggtcaaaactgcaatgagctaagattgcactactgcactccgggctgggagacagagtaagaccctgccttaaaaaaaaaaaaaaaaaaatgccttaaagaaaataataagagaagggtgtgttctcttccaagtaatgagccgatcaaggggaagcaacccaaggctagcaggctcttttcaattcccagctctgccactcttagcatggcagagagttggcctcattatgccagtatggctgccacagtgtcagacatcacattccaggcagtggaaaggagaaagaaccaaagggcatccctttctcttgaagcagtccctgtgaggggggattatctggaagccccaacccaatttctgcttccaaccattatccatagaaacaactggaagttgagaagtgcagtcttttaggtgggcacctggctgccctgtatgaaaccagaattaggttggtcagcaggaaaacaagaaaacacttactgtgttgactgaggtttttgacgcatcgctttattgtcaaattaaacaactctatctcattctgcactgaaacacgtactaccattgcctataattggaaaatgatcctcagaggcacagaagatgccctgatggaaagtttgccccttgggcaaagagacagccatgggaaccttcagacatagagagagaaggtggcttttctccctacattcctcaaatagctaagatttggccagtgtgttttctaagtcaattctagtgtgtttcatcctcacctcttccctctgtggctttgatgatggaagtgtagtcctaacctactgcacagctgggaccccctgcccctagatcccaatactggggatgggaggaccttgcactattcccctcagtccatctatcgaggtctttgcaggaagcatactgggaattgaaacgagagcctaaatgacatctaagaaaggcagtgttcaataccaggtattaggtgaggatgggattctaaggacatcagtgggaggcagggagccaccttcagacctcagcatggaagcttccaagatccagaggaagaggcaacagcactgagagtcataggtagaagaatcatcacagccctgctaaccaggcagctgatgcccctctcccctggctccctgtgtccaaatcctacaggggcatctgttggctgaactcaacctgaagccaaagagaagatgagtggagagaggcaacatttatagagctcaggtttctagggctggagagggatctggagggacacacaggagacacctggcataaccaaaaaatgattaaaaaaaaaaaaaaaaagaaacatctatggagcatgggacacggggagtggaggcagctaaaagccatctcatctttcaccgtattcaacaagcccattataacaagtctttcacgctcaaccattcaaacaatcccaacaatcccagcctaagaatttcctggcatttgatgaaaatggctgtgggttttgctatctttaagctccctgggaagcaggatataagcccagggctggcaggctctttctagctacctgctcttgcacatagagtttgcctcatggttgcaagaaggctgccatagctccagatggcacatagacattccaggcagcaggaaaaaggaaggagcacttaaccgaaggaggtcagggagttggttagtctccacctgaagaagagagccatgaaccagcttcagttgactaacgggctcctgtgagtgcatctttggacttttctggaggttgaaatctagatgtggtatgtgtcttaaagcagccaccaactcctcccattaccttccaagtgagcccaactacacgatggagcctcttccctgcccttggatctgggctgagcctctgacttgcgttgaccaacagaatgcagtgaaagtgatgccgatactaccctccctgccctagacttgggatacctggcagctatattcttccattcctcaggacttgcaaaaacgggtctcagcatgccttcccagagccatgaggtgtttctttgcccattcattgatctgagaagtgagtgtaaggagtttaaatcaacctctgttctgtgctagttaaggtaataaagttgctgcagtccagggggtaggtacctgtggacggctctgcgaataggacagttgcatttcttgggaatcaagtgcatccctaggctggcagtgcagcagaaatactgaataaaatgtgacaaatctccctg

SEQ ID NO: 415 - DNA, 2806 bp, Homo sapiens
ctgagagggcggaagccttggcactagcggcgcccgggcgcggagtgcgcagggcaaggtcctgcgctctgggccagcgctcggccatgcgatccgccgcgcggaggggacgcgccgcgcccgccgccagggactctttgccggtgctactgtttttatgcttgcttctgaagacgtgtgaacctaaaactgcaaatgcctttaaaccaaatatcctactgatcatggcggatgatctaggcactggggatctcggttgctacgggaacaatacactgagaacgccgaatattgaccagcttgcagaggaaggtgtgaggctcactcagcacctggcggccgccccgctctgcaccccaagccgagctgcattcctcacagggagacattccttcagatcaggcatggacgccagcaatggataccgggcccttcagtggaacgcaggctcaggtggactccctgagaacgaaaccacttttgcaagaatcttgcagcagcatggctatgcaaccggcctcataggaaaatggcaccagggtgtgaattgtgcatcccgcggggatcactgccaccaccccctgaaccacggatttgactatttctacggcatgcccttcacgctcacaaacgactgtgacccaggcaggccccccgaagtggacgccgccctgagggcgcagctctggggttacacccagttcctggcgctggggattctcaccctggctgccggccagacctgcggtttcttctgtgtctccgcgagagcagtcaccggcatggccggcgtgggctgcctgtttttcatctcttggtactcctccttcgggtttgtgcgacgctggaactgtatcctgatgagaaaccatgacgtcacggagcaacccatggttctggagaaaacagcgagtcttatgctaaaggaagctgtttcctatattgaaagacacaagcatgggccatttctcctcttcctttctttgctgcatgtgcacattccccttgtgaccacgagtgcattcctggggaaaagtcagcatggcttatatggtgataatgtggaggagatggactggctcataggtaaggttcttaatgccatcgaagacaatggtttaaagaactcaacattcacgtatttcacctctgaccatggaggacatttagaggcaagagatggacacagccagttagggggatggaacggaatttacaaaggtgggaagggcatgggaggatgggaaggtgggatccgcgtgcccgggatcttccactggccgggggtgctcccggccggccgagtgattggagagcccacgagcctgatggacgtgttccctactgtggtccagctggtgggtggcgaggtgccccaggacagggtgattgatggccacagcctggtacccttgctgcagggagctgaggcacgctcggcacatgagttcctgtttcattactgtgggcagcatcttcacgcagcacgctggcaccagaaggacagtggaagcgtctggaaggttcattacacgaccccgcagttccaccccgagggagcgggggcctgctacggccgaggcgtctgcccatgctccggggagggcgtgacccatcacagaccccctttgctctttgacctctccagggacccctccgaggcacggcccctgacccccgactccgagcccctgtaccacgccgtgatagcaagggggcatctgttggctgaactcaacctgaagccaaagagaagatgagtggagagaggcaacatttatagagctcaggtttctagggctggagagggatctggagggacacacaggagacacctggcataaccaaaaaatgattaaaaaaaaaaaaaaaaagaaacatctatggagcatgggacacggggagtggaggcagctaaaagccatctcatctttcaccgtattcaacaagcccattataacaagtctttcacgctcaaccattcaaacaatcccaacaatcccagcctaagaatttcctggcatttgatgaaaatggctgtgggttttgctatctttaagctccctgggaagcaggatataagcccagggctggcaggctctttctagctacctgctcttgcacatagagtttgcctcatggttgcaagaaggctgccatagctccagatggcacatagacattccaggcagcaggaaaaaggaaggagcacttaaccgaaggaggtcagggagttggttagtctccacctgaagaagagagccatgaaccagcttcagttgactaacgggctcctgtgagtgcatctttggacttttctggaggttgaaatctagatgtggtatgtgtcttaaagcagccaccaactcctcccattaccttccaagtgagcccaactacacgatggagcctcttccctgcccttggatctgggctgagcctctgacttgcgttgaccaacagaatgcagtgaaagtgatgccgatactaccctccctgccctagacttgggatacctggcagctatattcttccattcctcaggacttgcaaaaacgggtctcagcatgccttcccagagccatgaggtgtttctttgcccattcattgatctgagaagtgagtgtaaggagtttaaatcaacctctgttctgtgctagttaaggtaataaagttgctgcagtccagggggtaggtacctgtggacggctctgcgaataggacagttgcatttcttgggaatcaagtgcatccctaggctggcagtgcagcagaaatactgaataaaatgtgacaaatctccctg

SEQ ID NO: 416 - DNA, 742 bp, Homo sapiens
ctgagagggcggaagccttggcactagcggcgcccgggcgcggagtgcgcagggcaaggtcctgcgctctgggccagcgctcggccatgcgatccgccgcgcggaggggacgcgccgcgcccgccgccagggactctttgccggtgctactgtttttatgcttgcttctgaagacgtgtgaacctaaaactgcaaatgcctttaaaccaaatatcctactgatcatggcggatgatctaggcactggggatctcggttgctacgggaacaatacactgagaacgccgaatattgaccagcttgcagaggaaggtgtgaggctcactcagcacctggcggccgccccgctctgcaccccaagccgagctgcattcctcacagggagacattccttcagatcaggcatggacgccagcaatggataccgggcccttcagtggaacgcaggctcaggtggactccctgagaacgaaaccacttttgcaagaatcttgcagcagcatggctatgcaaccggcctcataggtgtggatatgtgggagcctcacattatacggtggttgggaatattcgtgataaaaaagatcccaggccaggcgtggtggcgcacgcctgtagtcccagctacttaggaggctgaggcaggagaatcgcttgaacccgggaagcggaggttgcagggagccgagatcacaccactgcactccagtctaggtgacaaagcgagactctgtctcaaaga

SEQ ID NO: 417 - DNA, 2245 bp, Homo sapiens
ctgagagggcggaagccttggcactagcggcgcccgggcgcggagtgcgcagggcaaggtcctgcgctctgggccagcgctcggccatgcgatccgccgcgcggaggggacgcgccgcgcccgccgccagggactctttgccggtgctactgtttttatgcttgcttctgaagacgtgtgaacctaaaactgcaaatgcctttaaaccaaatatcctactgatcatggcggatgatctaggcactggggatctcggttgctacgggaacaatacactgagaacgccgaatattgaccagcttgcagaggaaggtgtgaggctcactcagcacctggcggccgccccgctctgcaccccaagccgagctgcattcctcacagggagacattccttcagatcaggcatggacgccagcaatggataccgggcccttcagtggaacgcaggctcaggtggactccctgagaacgaaaccacttttgcaagaatcttgcagcagcatggctatgcaaccggcctcataggaaaatggcaccagggtgtgaattgtgcatcccgcggggatcactgccaccaccccctgaaccacggatttgactatttctacggcatgcccttcacgctcacaaacgactgtgacccaggcaggccccccgaagtggacgccgccctgagggcgcagctctggggttacacccagttcctggcgctggggattctcaccctggctgccggccagacctgcggtttcttctgtgtctccgcgagagcagtcaccggcatggccggcgtgggctgcctgtttttcatctcttggtactcctccttcgggtttgtgcgacgctggaactgtatcctgatgagaaaccatgacgtcacggagcaacccatggttctggagaaaacagcgagtcttatgctaaaggaagctgtttcctatattgaaagacacaagcatgggccatttctcctcttcctttctttgctgcatgtgcacattccccttgtgaccacgagtgcattcctggggaaaagtcagcatggcttatatggtgataatgtggaggagatggactggctcatagccagtgacttcatgtcatcatcagaagttaccgaaagtgaagcgataaagttaatgttcaggacaatgcagagacgctgtcttccttctatggccttcaagaaaccctggagaggaccagtgaggctgcagattcttaaaagagcatagacattaaaattcttgcagaatctgaatgtgtctcctgagacaagcatcgtgatagagttcacagtcttaaaagtctgcattttcaggtggggcaaggtggctcatgcctttaatcccagcattttgggaggctaaggcagggagatggcttgagaccaggagttcaagaccagcctgggcaacatagtgagacgcccccccccccatctctacaaaaaatttaaaaaattagccatggtggtgtgcacctgtggtcccagctactccagaggctgaggtgggaagatcatttgagcccaggaggctgaggctgcaatgagctataattattgcaccactgaactccagcctgggccacatagcaagaccctgtctccaaaaaaaaaaagaaataaaagacgaagaatagggagaaaaacttctctcatatcatttatttggtccttcagtatttctgattacttagtctaattttgcacaaaatcaactgtattagtccattcttgcaaagaaatacctgagactgggtaatttataaagaaaagaggttggattggctcacggttctgcaggctgcacaggaagcatggcagcatctgcttctggggagacctcggggagcttttgctcatggtggaaggcgaagggggagcaggcgtcttgtggcaggagaaggaccaagagaggagaggaagagccgcacacttttaaacaaccagatctcgtgagaagctactccctccgcagcaccaagcgggggatggtgctcaaccattcatgagaactctgtccccatcattcagtcacctccccccaggccccaccgccgattctgaggatgacaattccacatgagatttgggcggggacacacatccaaactatattgtcaaccttctacacagccaatgacttaacagcctcattagaagttacagaaactaaagcaataaagttcggacaatgcagagaggtcaccttccttctatggccttgaagaaaccctggag

SEQ ID NO: 418 - DNA, 213 bp, Homo sapiens
ttcattattaattataccaatcctttcatatatgtagaaaaaatgtttgagttggtcatctgtcttttattgaagatgcatttcaaatatcaaatatatttgaaagataaaatagcatctgtgaaattgaatattattttatgtgcgcttggctatgccctaaaatgtcagtttattatccctaaagacgtatttattgatgtttaccaagaa

SEQ ID NO: 419 - DNA, 2010 bp, Homo sapiens
atggagaggcgagcacgtccactcagactcggggtcctgccttcagtgcccccattcccatgccctcatccactcgatgcttcgacctgtcctcccaatgctgagcaaccagaggaggcccacagccagcaaaaagcctttcctctcaggtccatgggcaacagaggaagtgatgcctggagcttctcctgggctgagccctcatctggctgtgtccaggatgaagagcagtggttcaggcccactggggagcacgtgctggtggtgtgcctgctgctgaagcacctgcaggcatttgccaacagcctgaagcctgagcaggcctcgctctcctcccactcccactccaccagccgcctggaggagttgaaatgggccactgtcccaagattcgtccagcagaaactctacctcttcctgcagcgttactttggccactgcccactggccgcatcgttcagagctgtactggctccgcaggttcctacccttaccagaccagggagcactgggccccctgggctgggaaaagcccacccatggccctggcttctgaagggcctgcaagagagccaaacctcacagggctgtgtcctggaaatgtggctgagctacctgcagccatggcggtatgtgcctgacaagcaggctccaggcagcgactcccagtcccggtgtgcattggagaaatgccatgccactggctccccaaaatggatgttgctccagtggttggaggccaagccagtggcctgtgctggagtcagcctggccctggccccggtggcctcctgggttcctctcccaggccctgctttgtggagcacagaccagcccttcctaggctcaactttgccaggccctagaattgaccagtgtgtggagagccccctggctgctccttcctgttgtggctgggctttggcccccatgaataccaacggctcctactcagccaacgacctggacaagatggggcgggacagtgtccagaagacagacaagtacctggaggcggccctggagtacctgcaccagatattcccggtacaaactatggggcctgccccacagccatcagcgtccccttcttcaaaggatccactccccctcactcagcctgtggtcagcccaaagggcagaggcgcttctttctggcaactcagtgaagcacagctcacacaattcacacttgccttgggcaccacccaggatgagaatgaaaagcagcagctcctcgactgcaccgtgggtgaggatggactcatcctcatgccgctgggtcagtaccaggtgagaggcccctgtcccagaggggacccagagctgcagtccatctggagctacgagattgccagcttgatctgtgtgctcttccagtggtcgtctgccatcaaccacagacaggcacctgctaagcctcatgggcagatgcaggcagccggccatgcccatggccccaggctcagcctgtgcctcctgggtagctaccagattccgctttggctgctgctggccttctttgagcctgcttctgagccccacgcctgtggcagcacgtgccaccctgcctgcactgaagcggaccctgaagaacaactttgccaagcagcagaagaggctgcaggcactgcagaactggcacctgcccctctcccctctcggtgctttgagccacctgcatctgtgtccgcagccgggagcaggaagtttgccaggaagctggagaaggaaccaggccaaggaatgggacattatgtcagaaaaggagagctgaggtcagggctgaccagggccagactgcacagtgctggccccaagactgatagcatcctgacaggacggcaggcccaggttcatggagaagggtacacagtgacaactcctgatgaacacaggaataatgaatttatgataacaatcacaaatgatggggtagtgcacataaaaagggcgggacctcttatcaccagagggctgcaggccattgcccaagagtggcaggcagca

SEQ ID NO: 420 - DNA, 901 bp, Homo sapiens
ggcatgatatgggctgaatgtaaagaaatttggactcaaggccccaaggaatatttgtttgagttgtggaacatgcttgattttggtatgttagcaattttatcagcatcattcattgcaagattcagggcattctggcatgcttccaaagcccagagcatcactgatgcaagtgatactttgaaggacttgacaaaagtaacattgggagataatgtgaaatactacagtttggccaggagggagtgggacccctcggatcctcgtatggtgtctgaaggtctttgtgcagttgctgtggttttgagtttctctgggatagcttgtattttgccagcaaatgaaagctttggacctctgcagatgtcgcttggaggagcagtcaaagacatcttcaggttcatgctcatattcattatggtgtttgtggcctttatgattggaatgttcaacctctactcctactacattgatgtaaaacaaaatgaagccttcacaacagttgaagagagttttaagacactgttctgggctacatttgtgctttctgcagtgaaatcagtggtcatcaactatagccacaaattcattgaaaacattggttatgttctttatggagtctatgatgttacaatggtcattgttttgctaaatatgttaattgcaatgatcaacagttcactccaggaaattgaggatgacgctgatgtggagtggaaatttgcaagggccaaactctggttttcctgctttggggaggggagagcacttcctgttcccttcaatctggtgccgggtccagggtccctgttttgtctcctgctgaagcttaaagggtggatttctgagctctacccagggtcataaaaaaggtttccaggaagaggtagagctaagtaag

SEQ ID NO: 421 - DNA, 986 bp, Homo sapiens
aaaagtatctcaaaggctgttgagcacctcaataaagctattccgcccgtcttggtgagcaagaagctgtgtgtgtgaaattgggggacagtaacaaactggaagaaggcatgaatttaaatctaactgggaacacatctaaattgggtgcaaagaccttactagaagtgctgcttgctgtctgtgatgttgaagctgctgcaaggagccacctatactgtcacaatgggtcctggctggcaatccaaaagtatctagccaatgccagctttcagcaaggtccatggtagttttcacagtggtaatgggccggcagtgcaggagttcatggttctccctgctagaaccgtaacctcaggaaagccgtgctttaccagaaggatgtcatcaggcagaaatatggcaaagattcctcctaaacactggagctgctatggaatgtgattagaaagcctggctgtattataagtagtgaatggcatggacaatagcctctagttcttacagttcaggaaatatgaccttgatgttcaagcctccagatgtccttagcagttacatcacttctgaccagctggtaggcaggtacaagtccttcatcaaggactactcggtggtgtctactgaagatgccttggaccaggatgaccgagaaacttggcagaagctctctgctagtgcaggttatatccatgtgacagggaatcatctccctgtgcccagccggaaaggaactaccaagactacagacaaggactcgggcaactgcctcctactcaaggtgaatcagacagaccccatgatggaatctcttcaggagtgcaaagtggcccaggccgaaggatagggcgctatttcccactgtgttggggtgactgaagattcttgcattgccaaactcatggtgaggatctgtactaggtcaaccaaggctgcggccccttgcccatctaagcacttggccaagtacagccacctcctcaggt

SEQ ID NO: 422 - DNA, 6827 bp, Homo sapiens
cgaacggccggttccggctgaatgtcagtgctgggctgtgggccggggaggaaggcggctcgcggttcctccaccgcctccgccgccgcatcctccgcttgtgctaccgccgcgggcgctgggccgctctgctggtccggcatgagaccgtgagacgagagacgggtcggggccgccgacatgtttggccgctcgcggagctgggtgggcgggggccatggcaagacttcccgcaacatccactccttggaccacctcaagtatctgtaccacgttttgaccaaaaacaccacagtcacagaacagaaccggaacctgctagtggagaccatccgttccatcactgagatcctgatctggggagatcaaaatgacagctctgtatttgacttcttcctggagaagaatatgtttgttttcttcttgaacatcttgcggcaaaagtcgggccgttacgtgtgcgttcagctgctgcagaccttgaacatcctctttgagaacatcagtcacgagacctcactttattatttgctctcaaataactacgtaaattctatcatcgttcataaatttgacttttctgatgaggagattatggcctattatatatcgttcctgaaaacactttcgttaaaactcaacaaccacactgtccatttcttttataatgagcacaccaatgactttgccctgtacacagaagccatcaagtttttcaaccaccctgaaagcatggttagaattgctgtaagaaccataactttgaatgtctataaagtggataaccaggccatgctgcactacatccgagataaaactgctgttccttacttctccaatttggtctggttcattgggagccatgtgatcgaactcgatgactgcgtgcagactgatgaggagcatcggaatcggggtaaactgagtgatctggtggcagagcacctagaccacctgcactatctcaatgacatcctgatcatcaactgtgagttcctcaacgatgtgctcactgaccacctgctcaacaggctcttcctgcccctctacgtgtactcactggagaaccaggacaagggaggagaacggccgaaaattagcctgccggtgtctctttatcttctgtcacaggtcttcttaattatacatcatgcaccgctggtgaactcgttagctgaagtcattctgaatggtgatctgtctgagatgtacgctaagactgaacaggatattcagagaagttctgccaagcccagcattcggtgcttcattaaacccaccgagacactcgagcggtcccttgagatgaacaagcacaagggcaagaggcgggtgcaaaagagacccaactacaaaaacgttggggaagaagaagatgaggagaaagggcccaccgaggatgcccaagaagacgccgagaaggctaaaggtacagagggtggttcaaaaggcatcaagacgagtggggagagtgaagagatcgagatggtgatcatggagcgtagcaagctctcagagctggccgccagcacctccgtgcaggagcagaacaccacggacgaggagaaaagcgccgccgccacctgctctgagagcacgcaatggagcagacccttcctggatatggtgtaccacgcgctggacagcccggatgatgattaccatgccctgttcgtgctctgcctcctctatgccatgtctcataataaaggcatggatcctgaaaaattagagcgaatccagctccccgtgccaaatgcggccgagaagaccacctacaaccacccgctagctgaaagactcatcaggatcatgaacaacgctgcccagccagatgggaagatccggctggcgacgctggagctgagctgcctgcttctgaagcagcaagtcctgatgagtgctggctgcatcatgaaggacgtgcacctggcctgcctggagggtgcgagagaagaaagtgttcaccttgtacgacatttttataagggagaagacatttttttggacatgtttgaagatgagtataggagcatgacaatgaagcccatgaacgtggaatatctcatgatggacgcctccatcctgctgcccccaacaggcacgccactgacgggcattgacttcgtgaagcggctgccgtgtggcgatgtggagaagacccggcgggccatccgggtgttcttcatgctgcgttccctgtcactgcaattgcgaggggagcctgagacacagttgccgctgactcgggaggaggacctgatcaagactgatgatgtcctggatctgaataacagcgacttgattgcatgtacagtgatcaccaaggatggcggcatggtccagcgattcctggctgtggatatttaccagatgagtttggtggagcctgatgtgtccaggcttggctggggagtggtcaagtttgcaggcctattgcaggacatgcaggtgactggcgtggaggacgacagccgtgccctgaacatcaccatccacaagcctgcgtccagcccccattccaagcccttccccatcctccaggccaccttcatcttctcagaccacatccgctgcatcatcgccaagcagcgcctggccaaaggccgcatccaggcaaggcgcatgaagatgcagagaatagctgccctcctggacctcccaatccagcccaccactgaagtcctggggtttggactcggctcctccacctccactcagcacctgcctttccgcttctacgaccaggggcgccggggcagcagcgaccccacagtgcagcgctccgtgtttgcatcggtggacaaggtgccaggcttcgccgtggcccagtgcataaaccagcacagctccccgtccctgtcctcacagtcgccaccctccgccagcgggagccccagcggcagcgggagcaccagccactgcgactctggaggcaccagctcgtcctccaccccctccacagcccagagtccagcagatgcccccatgagtccagaactgcctaagcctcaccttcctgaccagttggtaatcgtcaacgaaacggaagcagactctaagcccagcaagaacgtggccaggagcgcagccgtggagacagccagcctgtcccccagcctcgtccctgcccggcagcccaccatttccctgctctgcgaggacacggctgacacgctgagcgtcgaatcgctgacccttgtccccccagttgacccccacagcctccgcagcctcaccggcatgcccccgctgtccacgccggctgccgcctgcacagagcccgtgggcgaagaggctgcatgtgctgagcctgtgggcaccgctgaggactgagtcagtgccggggcctccctttgtgtgtgtggccccgctggtagggaccccagtgccgctgactggcaagacacactgggagcacccaccattctgtgcggcccccagcagccatctcaaccacctatccctgcgctcccttgaatgggaagaagccccacgttgtccttgaattcctttttcactttgcatctcttcacgtgcaggctgggaccagcggagacaccgcggcgaatgcagatgactgcaccggccactcagggagctgcctgggctccgtgtctctgagccccgggtggcaggacccaccggcacctctttcttcctctgtcatatggctcctctgtcaccagccccagtgtgcacagaagaattggaccaggtcactgtacgtagaaatttgtagaaaagcagacttagataaacatctcctttggatatttatttccgcttttggcagcaggtgaacatttatttttaaaacttctatttaaaagaagtccaaaaacatcaacactaaggtttgatgtcatgtgaaaagtgtaataataacagttaagatttcatgatcattttcactggacctttcctgatattttgtttcagagttcttagtgtggctttttccatttatttaagtgattctttgttactcactaactctgcaagcctgtggaataatgaagtaccttcctggaaagtttggattattttttaaacaaaaacaagggagatacatgtattctcaggtacacacagagctgagagggctgaatggttttctgctatagcagccgagaggcctcccatcatggaaagatttctccaggaaaaggaggaatgtagccagctccccactcaggacgcttcctcatttctcttcaccaaaaccaaacagagacagcttccagcaccttcttcagtgttaccatctctaagaaggaaccagttgggaccgtgaagactcccgaccctgtggccatgatggaaatcaaaggaagacaccctctacgtcacctgccctcgactgtgtgtgcccacatgtgccgagagatggcccagagccagttcccctccagctgcaagggcatggtgtccccagagctctgagtctgtcactctccctctgctactgctgctgatctgaatatggaaaccccatggttcccttccccattcggactgggtgtgtacaagcaaggacccagatgcatcagacacagcccccaagatgttcctttctactcggccagctcgggagccagacacagcactcacagcccaggccgtgatccaccctccccaagtccaccagggccagcggcccctcacctctctggtcactggtgagaccttccacaactttcctccagacctgccagcagatgtgcccaccaggggcattaggtatccgccggagcctggccatagggtagtctcgggagccgcgctgagatcttttgccacctgcattttagaagaacatggtctctgtctcctcggcccagccagctgtcccggcaaggcctgccgagggcagttttcaacctcatgaaggaaacacagtcctgccaaggagggggagtggcgcccatggggacaggcctcagtccttagaagccctctgggtagctgtgcccacccagccttcatggctgcaggtacaaggacctttgcttccatagagaaaacgcacagctcagaaagggggccacatgggcagaaacccaaaggaaggacaaaccacgaccaccgtggccatctgcagaatccctggaagagaaggaaggcagggtggagcggggggaagaccatcatggagagaaggaccacagcatcaggagacgggacacgccacacccagcaggcagcctgtgtgttgcttaattttttaagagcaagaggggtagagaggatcaagctggccctggctggagatggctagcccctgagacatgcacttctggttttgaaatgactctgtctgtggggcagcagaaactagagaaggcaagtggctgccccaccccaaggcgtgaccaggaggaacagcctgcagctcactccatgccacacgggtgggccaccagcctgctgtcagaagtctctgggctccaactggtcttgtaaccactgagcactgaaggagagaggtcttggtcagggctggacagcatgcccgggaggaccagcagaggattaaaggtgactgggaggaccagcggaggataaaagacactgctcagggcagggcttctaccctgcatccctggccaagaaaagggcagtccccatgtgggcttgcagggtcactctcaggggcctctttcagctggggctggcaacttgcgtctgggggacacctccaggtgtgtggggtgaggatttcctataaccagggctcccagaagctttgcttatgtaaggaggtctgggagccagcccattggaggccaccagccattttggcttcaaaggaccccacctcacccaggtctcagcggcagtgggcacagctatgtcttcaggagctcccgtcaaacctcatagctggggcgctcccagacaggccagtccagacaggacacgctgggcccctggcatccagaggaagagccaggagtgtgggaaggcccacagtgggggctgtggcttctgacactcaggtcatagcctcagaggtctgaggtcagcccccacagacccatccggcccgccccccaagtccctgcagagagcacttagagttatggcccaggccctggtccacccttcccctgtgcacctccggctgggtttgccaagtcagggagcagggctggccgcaggaactcccaaaccttggctttgaatattgttgtggaggtgtgctcgtccctttctggacgtgcaaggtacctgtcccagcaggtcagatggggccagctgaggcgctcccccaggcaggaagggccagccttcaccatcgcgtgggattgggaggaggggcctccgtgagcagcccctcctctgccgctgtcccagcccagtccctctcccggagccttggcagcctcccacaacccagacacttgcgttcacaagcaacctaaggggcaggtgaagaagcgcagccctgccagacgcgctagattcctctaaggtctctgagatgcaccgttttttaaaaaggcgtggggtgaactgattttgatcttcttgtctagatgcaataaataaatctgaagcatttaatgtagtcatcttgacattgggcctacactgtacgagttccttatgtttccttgagctaaaaatatgtaaataatttttgtcccagtgagaaccgagggttagaaaacctcgatgcctctgagcctcgggaccgctctagggaagtacctgctttcgccagcatgactcatgcttcgtgggtactgaacacgagggtggaaatgaaaactggaacttccttgtaaatttaaacttggcaataaaagagaaaaaaagtt

SEQ ID NO: 423 - DNA, 1032 bp, Homo sapiens
atgcgggatacagaggctctcctgtggttcacacagaaagatgggaaccacacgggaccagaaatacggaccagggtcaagaactggtacctcaggatggagaaggcaagaaccaagtggaaccacgagagggatccaagatcagttgggagagttggagaatgggcatggctggcctcatcctttctttattcttcaggctctaatttctcatcagctgagtccaacagggaagacctgcccctggctgcccgtgccttctctgatgaggatattgtctttgctctggccatgaccaagagtgtgatttcaggaaagtttcttaaccttcctgagcttctgttttctcttcagtttaataacaacaataacatgaggttactatgggtgaatgaacgctgctgcttcttggaactcaggcctttgagcataacttgcttggcatcctctgcatcaaaaaaatgttcagtattgtttcacttgcgccagaagagcttgtctggaaaacgtctgataagccatgattgcacccctgcacgactcaccagtcaaacaatgcagttattatgctcctgggagaagaaggataattacctccacggccaggtgccagtagcaagtttccctgtggccaattactgtgtggtgctctgtgtagctctcctgggtcatggttctcaactcctccagggagtgaagtttgaagctggagaagtggagaaggaacacagaatttgttctcaagtctctaagtctcaagtctctaaggaggaagcacttactgcacaatgtgggggaaggcatgacggcttgaaagaagcaaagacatcaggaagaactgcactgttccagtgcctttgggatgctatttttcaaaagaagctggttcctgccacccacccccgacattttgaaattcagcagaaccatcactgttggcaaacatttgctgctgactctctgaaaggctatgttgttatcttatcaacccggctgactcagagaaccatgcgtcaaggaggggcgagagtc

SEQ ID NO: 424 - DNA, 4015 bp, Homo sapiens
aagcctggctacagataagggaccaaaatgactgactcaaaatatttcaccacgaccaagaaaggggagatcttcgagctgaaggcagagctcaacagtgacaagaaggagaagaagaaggaggcagtgaagaaagtgattgcatcgatgaccgtgggcaaagatgtcagtgccctcttccccgatgtggtcaactgcatgcagacggacaacctggagctgaagaagctagtatacctctacttgatgaattacgccaagagtcagcctgacatggccattatggccgtcaacacctttgtgaaggactgtgaggaccccaaccccctcatccgagccctggcagtgcggaccatgggctgcatccgcgttgacaagatcacagagtacctgtgcgagccactccggaagtgcctgaaggacgaggatccatatgtgcgcaagacagcagctgtgtgcgtggccaagctccacgacatcaacgcccagctggtggaggaccagggcttcctggacacccttaaagacctcatctccgactctaaccccatggtggtggccaatgcagtggcagcgctctcagaaattgccgagtctcaccccagcagcaacctgctcgatctgaacccacagtccatcaacaagctgctgacagccctcaatgagtgcaccgagtggggccagatcttcatcctggactgcctcgccaactatatgcccaaggacgaccgcgaggcccagagcatctgtgagcgggtcacccccaggctctcccatgccaactccgctgtggtgctctctgctgtgaaggtgctgatgaagttcatggagatgttgtctaaggacttggactactacggcacactgctcaagaagctggccccacccctggtcacactgctgtcagccgagccagagctgcagtatgtggccctgcgcaacatcaatctcatcgtgcagaaaaggcctgagatcctgaagcatgagatgaaggtgttcttcgtgaagtacaacgaccctatctacgtgaagctggagaagctggacatcatgatccgcctggcctctcaggccaacatcgcccaggtgttggcagagctgaaagagtacgcaacagaagtggatgtggactttgtacggaaggctgtgcgtgctattggccgctgcgccatcaaggtggagcaatctgcggagcgctgtgtgagcacgctgctcgacctcatccagaccaaggtcaactatgtggtccaggaggccatcgtggtcatcaaggacatcttccgcaagtaccccaacaagtatgagagtgtgattgccacactgtgtgagaatctggactccctggatgagcctgaggcccgggctgccatgatctggattgtgggcgagtacgcggaacggatcgacaacgcagatgagctgctggagagcttcctcgagggcttccatgacgagagcacacaggtccagctgcagctgctgacagccattgtgaaactctttctaaagaagccaacagagacccaggagctggtgcagcaggtcctcagtttggccactcaggactcagataacccagacctgcgggaccgtggctacatctactggcgcctgctgtccacggacccggtggcagccaaggaggtggtgttggctgagaagccactcatctctgaagagacggacctcatcgagcccacactgttagacgagcttatctgctacatcggcacgctggcttccgtctaccataagcctcccagtgcctttgtggaggggggccggggcgtcgtgcacaagagcctgccacctcgcacggcctcgagtgagagcgcagagagccctgagacagcccctactggagcacctcctggggagcagccagatgtcatccccgcccagggcgacctgctgggtgacctcctcaacctggacctcggccccccagtgagcggcccacccctggccacctcctcggtgcagatgggagctgtggaccttcttggcggtggccttgacagcctgatgggggatgagcctgaagggattgggggcaccaacttcgtggcacctccaacagcagcagtaccagccaatcttggagcacccatcggcagtggcctgagtgacctctttgacctgaccagtggcgtgggcaccctgtcaggatcatatgtggcccccaaagcagtctggctcccagccatgaaggctaaggggctggagatctcaggcaccttcacccgccaggtgggctccatctccatggacctgcagctgaccaacaaggccttgcaggtcatgaccgactttgccatccagttcaaccgcaacagctttggcctggcccccgccgcccccctccaggtccacgcaccactcagccccaaccagacagtggagatctccctgcctctcagcacggtgggctcggtcatgaagatggagcctctgaacaacctccaggtggccgtgaagaacaacatcgatgtcttctacttcagcaccttgtacccactgcacatcctctttgtggaggacgggaagatggaccggcagatgttcctggccacatggaaggatattcccaatgagaatgaggcccagttccagatcagagactgccccctcaatgcagaggctgcgagcagcaagctgcagagcagcaacatcttcactgtcgccaagaggaacgtggagggccaggacatgctctaccagtccctgaagctgaccaacggcatctgggtgctggcggagctgcggatccagccgggcaaccccagctgcacggtgagactgtccctgaagtgtcgagcaccagaggtgtcccagcacgtgtaccaggcctacgagaccatcctcaagaactgagaccccggccagcgcccaccccagccttctgcccgccccatcgaggaggcccctcgggggcagcacatcttcctcctcgcaggagggaccaggcggggctccaggccactcagtgggctccctggtcctgatggcagaacccacccgatccctggggtagggcaccaccccctcctggggtgagagcgcagtgcactcccgtgctctgggacacccctgctcctgtggctgtgatgtggggttaagtgaggtggggaccaaaggaaacagagccagagcagccacagaagctgtgcctgaagggtgagtgtggagcttgcccctccggctcacagccccggcagcccctggctccttggtctctccggttggtgttaaagggccctccactgccacctctcatgggatggaccctgccaacctggcctgggtgtgcagggaggggttccccttggtaccaggagagctgctcacttagggcctggggctcaaggagctgtaggtgccggcagaggggcagagctaggctgggaggagcccagggcctgcaccacccacttgcaaccaccaggctggtgccctgcagctgtgccagttgggccacagcctcccgagtgctgacccacatggtcaagaccaggcagaagctcccagagcccctgtctcgggctccccaccgactggcagctgcactatccccaactccccacttctgccccaagggtggtcactgcctgtgatacattcctcagtgtcgcctctgagcccaggcctcctgccacaaagactgggccgagagatggggctgggtaagcgggtgcgcctcctgtttgggtttcttcggggtttctctgtagtgtctgctgccctcctcctggcctcccaggtttcagttgtgtctgacagagcattaggttttcctgttactgctgtgtaataataaagaaagattcggcttttggcaatcacggacacttttttcccctccaccgaatgtcaggattgaaagctgcctccgagtggttggggatggttttctgaccctacggtaactagatctaatatatatcatcagaaaatatatattgtatgtttactcttattttcagaaagagaaaatgaataaaaatgatgacatcaa

SEQ ID NO: 425 - DNA, 4172 bp, Homo sapiens
gcgcgcgggcagctcacttccgcccggcaggtgacagccgcggggctccgagccgccggcagcccggacgcaccgggagagcgagaggtggaggccgcggacattttggtgccaagccgaaccgagccggggcgccgggagctattgggacctgcggaagcctggctacagataagggaccaaaatgactgactcaaaatatttcaccacgaccaagaaaggggagatcttcgagctgaaggcagagctcaacagtgacaagaaggagaagaagaaggaggcagtgaagaaagtgattgcatcgatgaccgtgggcaaagatgtcagtgccctcttccccgatgtggtcaactgcatgcagacggacaacctggagctgaagaagctagtatacctctacttgatgaattacgccaagagtcagcctgacatggccattatggccgtcaacacctttgtgaaggactgtgaggaccccaaccccctcatccgagccctggcagtgcggaccatgggctgcatccgcgttgacaagatcacagagtacctgtgcgagccactccggaagtgcctgaaggacgaggatccatatgtgcgcaagacagcagctgtgtgcgtggccaagctccacgacatcaacgcccagctggtggaggaccagggcttcctggacacccttaaagacctcatctccgactctaaccccatggtggtggccaatgcagtggcagcgctctcagaaattgccgagtctcaccccagcagcaacctgctcgatctgaacccacagtccatcaacaagctgctgacagccctcaatgagtgcaccgagtggggccagatcttcatcctggactgcctcgccaactatatgcccaaggacgaccgcgaggcccagagcatctgtgagcgggtcacccccaggctctcccatgccaactccgctgtggtgctctctgctgtgaaggtgctgatgaagttcatggagatgttgtctaaggacttggactactacggcacactgctcaagaagctggccccacccctggtcacactgctgtcagccgagccagagctgcagtatgtggccctgcgcaacatcaatctcatcgtgcagaaaaggcctgagatcctgaagcatgagatgaaggtgttcttcgtgaagtacaacgaccctatctacgtgaagctggagaagctggacatcatgatccgcctggcctctcaggccaacatcgcccaggtgttggcagagctgaaagagtacgcaacagaagtggatgtggactttgtacggaaggctgtgcgtgctattggccgctgcgccatcaaggtggagcaatctgcggagcgctgtgtgagcacgctgctcgacctcatccagaccaaggtcaactatgtggtccaggaggccatcgtggtcatcaaggacatcttccgcaagtaccccaacaagtatgagagtgtgattgccacactgtgtgagaatctggactccctggatgagcctgaggcccgggctgccatgatctggattgtgggcgagtacgcggaacggatcgacaacgcagatgagctgctggagagcttcctcgagggcttccatgacgagagcacacaggtccagctgcagctgctgacagccattgtgaaactctttctaaagaagccaacagagacccaggagctggtgcagcaggtcctcagtttggccactcaggactcagataacccagacctgcgggaccgtggctacatctactggcgcctgctgtccacggacccggtggcagccaaggaggtggtgttggctgagaagccactcatctctgaagagacggacctcatcgagcccacactgttagacgagcttatctgctacatcggcacgctggcttccgtctaccataagcctcccagtgcctttgtggaggggggccggggcgtcgtgcacaagagcctgccacctcgcacggcctcgagtgagagcgcagagagccctgagacagcccctactggagcacctcctggggagcagccagatgtcatccccgcccagggcgacctgctgggtgacctcctcaacctggacctcggccccccagtgagcggcccacccctggccacctcctcggtgcagatgggagctgtggaccttcttggcggtggccttgacagcctgatgggggatgagcctgaagggattgggggcaccaacttcgtggcacctccaacagcagcagtaccagccaatcttggagcacccatcggcagtggcctgagtgacctctttgacctgaccagtggcgtgggcaccctgtcaggatcatatgtggcccccaaagcagtctggctcccagccatgaaggctaaggggctggagatctcaggcaccttcacccgccaggtgggctccatctccatggacctgcagctgaccaacaaggccttgcaggtcatgaccgactttgccatccagttcaaccgcaacagctttggcctggcccccgccgcccccctccaggtccacgcaccactcagccccaaccagacagtggagatctccctgcctctcagcacggtgggctcggtcatgaagatggagcctctgaacaacctccaggtggccgtgaagaacaacatcgatgtcttctacttcagcaccttgtacccactgcacatcctctttgtggaggacgggaagatggaccggcagatgttcctggccacatggaaggatattcccaatgagaatgaggcccagttccagatcagagactgccccctcaatgcagaggctgcgagcagcaagctgcagagcagcaacatcttcactgtcgccaagaggaacgtggagggccaggacatgctctaccagtccctgaagctgaccaacggcatctgggtgctggcggagctgcggatccagccgggcaaccccagctgcacggtgagactgtccctgaagtgtcgagcaccagaggtgtcccagcacgtgtaccaggcctacgagaccatcctcaagaactgagaccccggccagcgcccaccccagccttctgcccgccccatcgaggaggcccctcgggggcagcacatcttcctcctcgcaggagggaccaggcggggctccaggccactcagtgggctccctggtcctgatggcagaacccacccgatccctggggtagggcaccaccccctcctggggtgagagcgcagtgcactcccgtgctctgggacacccctgctcctgtggctgtgatgtggggttaagtgaggtggggaccaaaggaaacagagccagagcagccacagaagctgtgcctgaagggtgagtgtggagcttgcccctccggctcacagccccggcagcccctggctccttggtctctccggttggtgttaaagggccctccactgccacctctcatgggatggaccctgccaacctggcctgggtgtgcagggaggggttccccttggtaccaggagagctgctcacttagggcctggggctcaaggagctgtaggtgccggcagaggggcagagctaggctgggaggagcccagggcctgcaccacccacttgcaaccaccaggctggtgccctgcagctgtgccagttgggccacagcctcccgagtgctgacccacatggtcaagaccaggcagaagctcccagagcccctgtctcgggctccccaccgactggcagctgcactatccccaactccccacttctgccccaagggtggtcactgcctgtgatacattcctcagtgtcgcctctgagcccaggcctcctgccacaaagactgggccgagagatggggctgggtaagcgggtgcgcctcctgtttgggtttcttcggggtttctctgtagtgtctgctgccctcctcctggcctcccaggtttcagttgtgtctgacagagcattaggttttcctgttactgctgtgtaataataaagaaagattcggcttttggcaatcacggacacttttttcccctccaccgaatgtcaggattgaaagctgcctccgagtggttggggatggttttctgaccctacggtaactagatctaatatatatcatcagaaaatatatattgtatgtttactcttattttcagaaagagaaaatgaataaaaatgatgacatcaa

SEQ ID NO: 426 - DNA, 2958 bp, Homo sapiens
cgcctccccctccgcctccgcctgcggtgcacattaaagatccaaagtcatgactgactccaagtatttcacaaccaataaaaaagcagaaatatttgaactaaaagctgaactcagcaatgaaaagaaagaaaagagaaaggaggctgtgaagaaagtgattgctgttattaccgtggggaaggatgttagttctgtctttccagacatagtgaactgtatgcagactgacaatctgaaactaaagaagcttgtgtatctctacttgatgaactatgccaacagtcagccagacatggccatcatagctgtaaatagctttgtgaaggactgtgaagatcctaatcttttgattcgagccttggcagtcagaaccatggggtgcatctgggtagacaaaattacagaatatctctctgagcccctcctcaagtgcttagaggatgaggatccctatgttcggaaaacagcagcagtatgcgtggcaaaactccatgacatcaacgcccaaatggtggaagatcagggatttttggattctctatggggtctcatagcagattcaaatccaatggtggtggctaatgctgtagcagcattatctgaaatcagtgagtctcacccaaacagcaacttactcaatctgaacacacagtacattaataagctgcggacagccctgaataagtgcactgaaggggccagattttcatgctggactgcctgtctaattacaaccctaaaaatgatcggaaggctcagagcatctgtgagcgggtaactccccagctatcccatgccaactcagcagtggtgctttcagcggtaaaagtactaatgaagtttctagaattgttacctaaggattctgactactacaatatgctgctgaagaagttagcccctccacttgtcactttgatgtctggggagtcagaagtgcactatgtctccctgaggaacatcaacttaattgtccagaaaaggcctgaaatcttgaagcaggaaatcaaagtcttctttgtgaagtacaatgatcccatctatgttaaactagagaagttggacatcaggattcatttggcatcacaagccaacattgctcaggttctggcagaactgaaggaatatgccacagaggtgaatgttgactttgttcgaaaagctgtgtgggccactggacggtgtgccatcaaggtggagcaatctgcagagcactgtgtaagcacattgcttgatctaatcaagaccaaagtgaattatgtggtccaagaagtgattgttgtcatcagggacatcttccgcaaatactccaacaagtatgaaagtatcattgccactctatgtgagaacttagactcgctggatgagccagatgctcgatcggctatgatttggattgtgggagaataagctgaaagaattgacaatgcagatgagttactagaaagcttcctggagggttttcatgatgaaaacacccaggtgcagctcactctgcttactgccataatgaagctgtttctcaagaaaccaccaaaacacaagagctagtccagcagatgttgactttggcaacacaggattctgataatcctgaccttcgagaacggggctatacttattgggctcctctctcagctgaccctgtcatggctaaagaagtagtcttgtctgagaagccactgatctctcaggagacggaacctattgagccaactgcgttggaggagctaatctgccacattggttctttggcctctgtgtatcgtaagccttccagtgcttttgtggaaggaagtcatggaatccatcgtaaacacttgccaattcatcatgggagcactgacacaggtgacagccctgttggcaccaccaccgcaacgaacctggaacagcctcaggttatcccccgtcaaggtgatcttctggggagtcttttaaaccttgacctcagtctcccagtcaatgtgccacaggtgtcctccatgcagatgggagcagtggatctcctaggaggaggactagatagtctgtggtgtcatccccagcactcctctggccatccatacaccactgatgccaaaccagagcattgatgtctccctgcctctcaacaccttgggcccagtcatgaagatggaacctctgaataacctgcaggtggctgtgaaaaacagtatcgatgtcttctacttcagctgcctcagcccactcaatgtgctttttgtagaagacagcaaaatggagcaccaggtcgtccttgcaacatggaagaatattcccaatgaaaatgaacttcagtttcagattaaggaatgtcatttaaatgctgacactgtctccagcgagttgcaaaacaatgtttataccattgccaagaggaatgtggaagggcaggacattctgtaccaatccctgaagctcactaatggcatttggattttggccgagctacgtatgcagccaggaaaccccaattatacactgtcacggaagtgtagagctcctgaagtctctcaatacatctatcaggtccacaacagcattttgaaaaactaacaagactggtccagtaccctccaatcatgctgtgatcggtgcaagccaagaacccttaactggaagaaattgtattgctgtgtagagtctgaacccaaacacactgaggccacccagcaaggtagtaactagtctaacctgtgctaacattaaggcacaacctgttggatagttttagcttcctttgaacatttgtaaccactgcttcagtcacctcccacctctcaccacctgctgctgctatctgtccttatttgtgggcttctccatgctgtgccaatggctggctttttctacaccctcttttgagtatagtttggtagtttgtaattgagagctcatttcaaaagcagaaaaagacaaccaatattaaagcaagaaaaagtgtcattgaaa

SEQ ID NO: 427 - DNA, 4014 bp, Homo sapiens
tgcagaagcctggctacagataagggaccaaaatgactgactcaaaatatttcaccacgaccaagaaaggggagatcttcgagctgaaggcagagctcaacagtgacaagaaggagaagaagaaggaggcagtgaagaaagtgattgcatcgatgaccgtgggcaaagatgtcagtgccctcttccccgatgtggtcaactgcatgcagacggacaacctggagctgaagaagctagtatacctctacttgatgaattacgccaagagtcagcctgacatggccattatggccgtcaacacctttgtgaaggactgtgaggaccccaaccccctcatccgagccctggcagtgcggaccatgggctgcatccgcgttgacaagatcacagagtacctgtgcgagccactccggaagtgcctgaaggacgaggatccatatgtgcgcaagacagcagctgtgtgcgtggccaagctccacgacatcaacgcccagctggtggaggaccagggcttcctggacacccttaaagacctcatctccgactctaaccccatggtggtggccaatgcagtggcagcgctctcagaaattgccgagtctcaccccagcagcaacctgctcgatctgaacccacagtccatcaacaagctgctgacagccctcaatgagtgcaccgagtggggccagatcttcatcctggactgcctcgccaactatatgcccaaggacgaccgcgaggcccagagcatctgtgagcgggtcacccccaggctctcccatgccaactccgctgtggtgctctctgctgtgaaggtgctgatgaagttcatggagatgttgtctaaggacttggactactacggcacactgctcaagaagctggccccacccctggtcacactgctgtcagccgagccagagctgcagtatgtggccctgcgcaacatcaatctcatcgtgcagaaaaggcctgagatcctgaagcatgagatgaaggtgttcttcgtgaagtacaacgaccctatctacgtgaagctggagaagctggacatcatgatccgcctggcctctcaggccaacatcgcccaggtgttggcagagctgaaagagtacgcaacagaagtggatgtggactttgtacggaaggctgtgcgtgctattggccgctgcgccatcaaggtggagcaatctgcggagcgctgtgtgagcacgctgctcgacctcatccagaccaaggtcaactatgtggtccaggaggccatcgtggtcatcaaggacatcttccgcaagtaccccaacaagtatgagagtgtgattgccacactgtgtgagaatctggactccctggatgagcctgaggcccgggctgccatgatctggattgtgggcgagtacgcggaacggatcgacaacgcagatgagctgctggagagcttcctcgagggcttccatgacgagagcacacaggtccagctgcagctgctgacagccattgtgaaactctttctaaagaagccaacagagacccaggagctggtgcagcaggtcctcagtttggccactcaggactcagataacccagacctgcgggaccgtggctacatctactggcgcctgctgtccacggacccggtggcagccaaggaggtggtgttggctgagaagccactcatctctgaagagacggacctcatcgagcccacactgttagacgagcttatctgctacatcggcacgctggcttccgtctaccataagcctcccagtgcctttgtggaggggggccggggcgtcgtgcacaagagcctgccacctcgcacggcctcgagtgagagcgcagagagccctgagacagcccctactggagcacctcctggggagcagccagatgtcatccccgcccagggcgacctgctgggtgacctcctcaacctggacctcggccccccagtgagcggcccacccctggccacctcctcggtgcagatgggagctgtggaccttcttggcggtggccttgacagcctgatgggggatgagcctgaagggattgggggcaccaacttcgtggcacctccaacagcagcagtaccagccaatcttggagcacccatcggcagtggcctgagtgacctctttgacctgaccagtggcgtgggcaccctgtcaggatcatatgtggcccccaaagcagtctggctcccagccatgaaggctaaggggctggagatctcaggcaccttcacccgccaggtgggctccatctccatggacctgcagctgaccaacaaggccttgcaggtcatgaccgactttgccatccagttcaaccgcaacagctttggcctggcccccgccgcccccctccaggtccacgcaccactcagccccaaccagacagtggagatctccctgcctctcagcacggtgggctcggtcatgaagatggagcctctgaacaacctccaggtggccgtgaagaacaacatcgatgtcttctacttcagcaccttgtacccactgcacatcctctttgtggaggacgggaagatggaccggcagatgttcctggccacatggaaggatattcccaatgagaatgaggcccagttccagatcagagactgccccctcaatgcagaggctgcgagcagcaagctgcagagcagcaacatcttcactgtcgccaagaggaacgtggagggccaggacatgctctaccagtccctgaagctgaccaacggcatctgggtgctggcggagctgcggatccagccgggcaaccccagctgcacgctgtccctgaagtgtcgagcaccagaggtgtcccagcacgtgtaccaggcctacgagaccatcctcaagaactgagaccccggccagcgcccaccccagccttctgcccgccccatcgaggaggcccctcgggggcagcacatcttcctcctcgcaggagggaccaggcggggctccaggccactcagtgggctccctggtcctgatggcagaacccacccgatccctggggtagggcaccaccccctcctggggtgagagcgcagtgcactcccgtgctctgggacacccctgctcctgtggctgtgatgtggggttaagtgaggtggggaccaaaggaaacagagccagagcagccacagaagctgtgcctgaagggtgagtgtggagcttgcccctccggctcacagccccggcagcccctggctccttggtctctccggttggtgttaaagggccctccactgccacctctcatgggatggaccctgccaacctggcctgggtgtgcagggaggggttccccttggtaccaggagagctgctcacttagggcctggggctcaaggagctgtaggtgccggcagaggggcagagctaggctgggaggagcccagggcctgcaccacccacttgcaaccaccaggctggtgccctgcagctgtgccagttgggccacagcctcccgagtgctgacccacatggtcaagaccaggcagaagctcccagagcccctgtctcgggctccccaccgactggcagctgcactatccccaactccccacttctgccccaagggtggtcactgcctgtgatacattcctcagtgtcgcctctgagcccaggcctcctgccacaaagactgggccgagagatggggctgggtaagcgggtgcgcctcctgtttgggtttcttcggggtttctctgtagtgtctgctgccctcctcctggcctcccaggtttcagttgtgtctgacagagcattaggttttcctgttactgctgtgtaataataaagaaagattcggcttttggcaatcacggacacttttttcccctccaccgaatgtcaggattgaaagctgcctccgagtggttggggatggttttctgaccctacggtaactagatctaatatatatcatcagaaaatatatattgtatgtttactcttattttcagaaagagaaaatgaataaaaatgatgacatcaa

SEQ ID NO: 428 - DNA, 5712 bp, Homo sapiens
cctgcccaccatctttgtccctggcaaagtgggttttgcgcagtggcttagacctagaaaagaatcgtgacgggcaggaaaccattacaccaccacctgggctgtgctctccggctcccgccgccacccccgccctcgccttcgcctccgcctccggtgcacattaaagatccaaagtcatgactgactccaagtatttcacaaccaataaaaaaggagaaatatttgaactaaaagctgaactcaacaatgaaaagaaagaaaagagaaaggaggctgtgaagaaagtgattgctgctatgaccgtggggaaggatgttagttctctctttccagacgtagtgaactgtatgcagactgacaatctggaactaaagaagcttgtgtatctctacttgatgaactacgccaagagtcagccagacatggccatcatggctgtaaacagctttgtgaaggactgtgaagatcctaatcctttgattcgagccttggcagtcagaaccatggggtgcatccgggtagacaaaattacagaatatctctgtgagccgctccgcaagtgcttgaaggatgaggatccctatgttcggaaaacagcagcagtctgcgtggcaaaactccatgatatcaatgcccaaatggtggaagatcagggatttctggattctctacgggatctcatagcagattcaaatccaatggtggtggctaatgccgtagcggcattatctgaaatcagtgagtctcacccaaacagcaacttacttgatctgaacccacagaacattaataagctgctgacagccctgaatgaatgcactgaatggggccagattttcatcctggactgcctgtctaattacaaccctaaagatgatcgggaggctcagagcatctgtgagcgggtaactccccggctatcccatgccaactcagcagtggtgctttcagcggtaaaagtcctaatgaagtttctagaattgttacctaaggattctgactactacaatatgctgctgaagaagttagcccctccacttgtcactttgctgtctggggagccagaagtgcagtatgtcgccctgaggaacatcaacttaattgtccagaaaaggcctgaaatcttgaagcaggaaatcaaagtcttctttgtgaagtacaatgatcccatctatgttaaactagagaagttggacatcatgattcgtttggcatctcaagccaacattgctcaggttctggcagaactgaaagaatatgctacagaggtggatgttgactttgttcgaaaagctgtgcgggccattggacggtgtgccatcaaggtggagcaatctgcagagcgctgtgtaagcacattgcttgatctaatccagaccaaagtgaattatgtggtccaagaagcaattgttgtcatcagggacatcttccgcaaataccccaacaagtatgaaagtatcatcgccactctgtgtgagaacttagactcgctggatgagccagatgctcgagcagctatgatttggattgtgggagaatatgctgaaagaattgacaatgcagatgagttactagaaagcttcctggagggttttcacgatgaaagcacccaggtgcagctcactctgcttactgccatagtgaagctgtttctcaagaaaccatcagaaacacaggagctagtccagcaggtcttgagtttggcaacacaggattctgataatcctgaccttcgagaccggggctatatttattggcgccttctctcaactgaccctgttacagctaaagaagtagtcttgtctgagaagccactgatctctgaggagacggaccttattgagccaactctgctggatgagctaatctgccacattggttctttggcctctgtgtatcataagcctcccaatgcttttgtggaaggaagtcatggaattcatcgtaaacacttgccaattcatcatgggagcactgatgcaggtgacagccctgttggcactaccactgcaacgaacctggaacagcctcaggttatcccctctcaaggtgatcttctaggggatcttttaaaccttgacctcggtcccccagtcaatgtgccacaggtgtcctccatgcagatgggagcagtggatctcctaggaggaggactagatagtctggtgggacaatccttcatcccatcatcggtgcctgcaacctttgctccttcacctacacctgctgtggtcagcagtggactgaatgacctgtttgaactctccacagggataggcatggcacctggtggatatgtggctcctaaggctgtctggctacctgcagtaaaggctaaaggcttggagatttccggaacatttactcaccgccaagggcacatctatatggaaatgaacttcaccaataaagctctgcagcacatgacagattttgcaatccagtttaacaaaaatagctttggtgtcatccccagcactcctctggccatccatacaccactgatgccaaaccagagcattgatgtctccctgcctctcaataccttgggcccagtcatgaagatggaacctctgaataacctccaggtggctgtgaaaaacaatatcgatgtcttctacttcagctgcctcatcccactcaatgtgctttttgtagaagatggcaaaatggagcgccaggtcttccttgcaacatggaaggatattcccaatgaaaatgaacttcagtttcagattaaggaatgtcatttaaatgctgacactgtttccagcaagttgcaaaacaacaatgtttatactattgccaagaggaatgtggaagggcaggacatgctgtaccaatccctgaagctcactaatggcatttggattttggccgaactacgtatccagccaggaaaccccaattacacgctgtcactgaagtgtagagctcctgaagtctctcaatacatctatcaggtctacgacagcattttgaaaaactaacaagactggtccagtacccttcaaccatgctgtgatcggtgcaagtcaagaactcttaactggaagaaattgtattgctgcgtagaatctgaacacactgaggccacctagcaaggtagtaactagtctaacctgtgctaacattagggcacaacctgttggatagttttagcttcctgtgaacatttgtaaccactgcttcagtcacctcccacctcttgccacctgctgctgctatctgtccttacttgtgggcttctccatgctgtgccaatggctggctttttctacaccctcttttgagtgtagtttggtattttgtaattgagagctcatttcaaaagcagaaaaagacaacaaatattaaagcaaggaaaagtgtaactgaaacactgcactttactgttttatacttttgtacatatgagaaatcaagggattagtgcaaccagtagaaagcattgaaatgactgtcattaaccacacagtcctggaggcagagatgcagttacctaccctagcttttgatgggttctcttacctgtagtagccttatccctggtcatttggattttcagtttgcttttttctttttttcccctccaaactccttttccttggccaagccttcatgcttccccctttccatattataatctcatttgattgctctgcagttgggaacggtgatcttcttgaatgatgtttcagtgtgcaaaaactatagagcctgtcagcaccaaagctgacagaagttataccttactcctttcctttcccctgaacaaacctgctaatcccactaattcaggaatttgagtagagatggggaacaagaacccagatgctgtcccctcaccccctctcctgtatttctcaggtccagttcaaatctaaaattctacttttagagttgaaacagagtaataacttatctaaccctcttttcctacaaaggagaaagataaaaggcacaaaggttaccgccaaggcccgtcagctgtgtagtggcaaagccgagaccgagtctcctaagtccccgtcagtgtggttttcaccacaggactgtctcttgtcgttttcccctaatgccttctcctgccttttctgtgcctagtttttggctcttcacatattccatattgattttgacgctctgtatattggcatcaggtggcagctgaatatcttttgaattactcgaaggtaaagccagatgccagaatgaaggtgtagccagtgtttcccatatgcccctggagccccacttattgaggccagcagaataggtgcagagatgaagtgagcttagagatgttgcaaatgctctttatcccttcagctctctgatctgctctttcttcatgatacttagtctgcagggcatattaagatcatcccagaggttcaggcagttcctgtcatctctgaaaagactgggggatatgaaatcttccccctaccccacttaatgcgttggatatgatttttcaaagaatgcttcatgcccaaaataccagcctgtttagcagtgttacactgtttgatctgcgggcacttgttgcattgcctggcacccaatattcagggtccatgactaagactggtcttctcagatgccctgcttaaatcaggggcacttcaggctccacaggcgtcatgttggactgagacctaactcactggactcagaggaggaatcgtggaaaacaagagcaaaactaccccacacccctatttcatgtctgaaataaccctgtttcataccagttgcaaagcttgtggggagcggtcccacaaagcactttcttaaaccttgagaatctccaagagaaaaatatttggggaaggagggaggaaatatgtcccttgcacaccacccctgaagcacatggcagtaggaaacagcataggattgtatgtgggaggtggataggtcggtgatgtgtggagcggaaaagcaggttggtaaagttcccttcttgggacttattcctggagtcagtggatacaagtagtgcagaaggttcacactgcaaatagtgttctcatctcaaagcaaactatcattccagaaggaaaagtgtgtcagggcaagcagacaacacaatttcctatcagaatatgtccctcaacccccgaaacaaggcttctctcagcctccccaccagtgatggataacagctcctattctcagctgacctgactgagccaacccatgaactcttcactccttggggaagccacctcccatcacacccctgagcagagttagggaggaattctacttcccataaaaggacctctcctgagaggcaaaacctgttgcctccaccacggcttccctcttggctcattccaagcttggccaaattggggaagtgggatggaggttgccctgcatcccccctcctctgcctgagtgtgtctttgtaatgtcagctggcatcatacaaagagcaggagaagcaaacacccagaactcttttgctggtcagagattccctgagtgtctgtcctcacccaagcctgctctgtgtctgtgttgtgaagcttgagactctggaaagaaatggggagggggggcaggggaaatgttgccctaagaatgcttctcattcctctgttcttattgggtcctgtttttcgggagggtgggggttgggggaagcttgaccttgtgtcttcgtcaataaactcacatttacacaaaatgaag

SEQ ID NO: 429 - DNA, 5706 bp, Homo sapiens
cctgcccaccatctttgtccctggcaaagtgggttttgcgcagtggcttagacctagaaaagaatcgtgacgggcaggaaaccattacaccaccacctgggctgtgctctccggctcccgccgccacccccgccctcgccttcgcctccgcctccggtgcacattaaagatccaaagtcatgactgactccaagtatttcacaaccaataaaaaaggagaaatatttgaactaaaagctgaactcaacaatgaaaagaaagaaaagagaaaggaggctgtgaagaaagtgattgctgctatgaccgtggggaaggatgttagttctctctttccagacgtagtgaactgtatgcagactgacaatctggaactaaagaagcttgtgtatctctacttgatgaactacgccaagagtcagccagacatggccatcatggctgtaaacagctttgtgaaggactgtgaagatcctaatcctttgattcgagccttggcagtcagaaccatggggtgcatccgggtagacaaaattacagaatatctctgtgagccgctccgcaagtgcttgaaggatgaggatccctatgttcggaaaacagcagcagtctgcgtggcaaaactccatgatatcaatgcccaaatggtggaagatcagggatttctggattctctacgggatctcatagcagattcaaatccaatggtggtggctaatgccgtagcggcattatctgaaatcagtgagtctcacccaaacagcaacttacttgatctgaacccacagaacattaataagctgctgacagccctgaatgaatgcactgaatggggccagattttcatcctggactgcctgtctaattacaaccctaaagatgatcgggaggctcagagcatctgtgagcgggtaactccccggctatcccatgccaactcagcagtggtgctttcagcggtaaaagtcctaatgaagtttctagaattgttacctaaggattctgactactacaatatgctgctgaagaagttagcccctccacttgtcactttgctgtctggggagccagaagtgcagtatgtcgccctgaggaacatcaacttaattgtccagaaaaggcctgaaatcttgaagcaggaaatcaaagtcttctttgtgaagtacaatgatcccatctatgttaaactagagaagttggacatcatgattcgtttggcatctcaagccaacattgctcaggttctggcagaactgaaagaatatgctacagaggtggatgttgactttgttcgaaaagctgtgcgggccattggacggtgtgccatcaaggtggaggcaaagcgctgtgtaagcacattgcttgatctaatccagaccaaagtgaattatgtggtccaagaagcaattgttgtcatcagggacatcttccgcaaataccccaacaagtatgaaagtatcatcgccactctgtgtgagaacttagactcgctggatgagccagatgctcgagcagctatgatttggattgtgggagaatatgctgaaagaattgacaatgcagatgagttactagaaagcttcctggagggttttcacgatgaaagcacccaggtgcagctcactctgcttactgccatagtgaagctgtttctcaagaaaccatcagaaacacaggagctagtccagcaggtcttgagtttggcaacacaggattctgataatcctgaccttcgagaccggggctatatttattggcgccttctctcaactgaccctgttacagctaaagaagtagtcttgtctgagaagccactgatctctgaggagacggaccttattgagccaactctgctggatgagctaatctgccacattggttctttggcctctgtgtatcataagcctcccaatgcttttgtggaaggaagtcatggaattcatcgtaaacacttgccaattcatcatgggagcactgatgcaggtgacagccctgttggcactaccactgcaacgaacctggaacagcctcaggttatcccctctcaaggtgatcttctaggggatcttttaaaccttgacctcggtcccccagtcaatgtgccacaggtgtcctccatgcagatgggagcagtggatctcctaggaggaggactagatagtctggtgggacaatccttcatcccatcatcggtgcctgcaacctttgctccttcacctacacctgctgtggtcagcagtggactgaatgacctgtttgaactctccacagggataggcatggcacctggtggatatgtggctcctaaggctgtctggctacctgcagtaaaggctaaaggcttggagatttccggaacatttactcaccgccaagggcacatctatatggaaatgaacttcaccaataaagctctgcagcacatgacagattttgcaatccagtttaacaaaaatagctttggtgtcatccccagcactcctctggccatccatacaccactgatgccaaaccagagcattgatgtctccctgcctctcaataccttgggcccagtcatgaagatggaacctctgaataacctccaggtggctgtgaaaaacaatatcgatgtcttctacttcagctgcctcatcccactcaatgtgctttttgtagaagatggcaaaatggagcgccaggtcttccttgcaacatggaaggatattcccaatgaaaatgaacttcagtttcagattaaggaatgtcatttaaatgctgacactgtttccagcaagttgcaaaacaacaatgtttatactattgccaagaggaatgtggaagggcaggacatgctgtaccaatccctgaagctcactaatggcatttggattttggccgaactacgtatccagccaggaaaccccaattacacgctgtcactgaagtgtagagctcctgaagtctctcaatacatctatcaggtctacgacagcattttgaaaaactaacaagactggtccagtacccttcaaccatgctgtgatcggtgcaagtcaagaactcttaactggaagaaattgtattgctgcgtagaatctgaacacactgaggccacctagcaaggtagtaactagtctaacctgtgctaacattagggcacaacctgttggatagttttagcttcctgtgaacatttgtaaccactgcttcagtcacctcccacctcttgccacctgctgctgctatctgtccttacttgtgggcttctccatgctgtgccaatggctggctttttctacaccctcttttgagtgtagtttggtattttgtaattgagagctcatttcaaaagcagaaaaagacaacaaatattaaagcaaggaaaagtgtaactgaaacactgcactttactgttttatacttttgtacatatgagaaatcaagggattagtgcaaccagtagaaagcattgaaatgactgtcattaaccacacagtcctggaggcagagatgcagttacctaccctagcttttgatgggttctcttacctgtagtagccttatccctggtcatttggattttcagtttgcttttttctttttttcccctccaaactccttttccttggccaagccttcatgcttccccctttccatattataatctcatttgattgctctgcagttgggaacggtgatcttcttgaatgatgtttcagtgtgcaaaaactatagagcctgtcagcaccaaagctgacagaagttataccttactcctttcctttcccctgaacaaacctgctaatcccactaattcaggaatttgagtagagatggggaacaagaacccagatgctgtcccctcaccccctctcctgtatttctcaggtccagttcaaatctaaaattctacttttagagttgaaacagagtaataacttatctaaccctcttttcctacaaaggagaaagataaaaggcacaaaggttaccgccaaggcccgtcagctgtgtagtggcaaagccgagaccgagtctcctaagtccccgtcagtgtggttttcaccacaggactgtctcttgtcgttttcccctaatgccttctcctgccttttctgtgcctagtttttggctcttcacatattccatattgattttgacgctctgtatattggcatcaggtggcagctgaatatcttttgaattactcgaaggtaaagccagatgccagaatgaaggtgtagccagtgtttcccatatgcccctggagccccacttattgaggccagcagaataggtgcagagatgaagtgagcttagagatgttgcaaatgctctttatcccttcagctctctgatctgctctttcttcatgatacttagtctgcagggcatattaagatcatcccagaggttcaggcagttcctgtcatctctgaaaagactgggggatatgaaatcttccccctaccccacttaatgcgttggatatgatttttcaaagaatgcttcatgcccaaaataccagcctgtttagcagtgttacactgtttgatctgcgggcacttgttgcattgcctggcacccaatattcagggtccatgactaagactggtcttctcagatgccctgcttaaatcaggggcacttcaggctccacaggcgtcatgttggactgagacctaactcactggactcagaggaggaatcgtggaaaacaagagcaaaactaccccacacccctatttcatgtctgaaataaccctgtttcataccagttgcaaagcttgtggggagcggtcccacaaagcactttcttaaaccttgagaatctccaagagaaaaatatttggggaaggagggaggaaatatgtcccttgcacaccacccctgaagcacatggcagtaggaaacagcataggattgtatgtgggaggtggataggtcggtgatgtgtggagcggaaaagcaggttggtaaagttcccttcttgggacttattcctggagtcagtggatacaagtagtgcagaaggttcacactgcaaatagtgttctcatctcaaagcaaactatcattccagaaggaaaagtgtgtcagggcaagcagacaacacaatttcctatcagaatatgtccctcaacccccgaaacaaggcttctctcagcctccccaccagtgatggataacagctcctattctcagctgacctgactgagccaacccatgaactcttcactccttggggaagccacctcccatcacacccctgagcagagttagggaggaattctacttcccataaaaggacctctcctgagaggcaaaacctgttgcctccaccacggcttccctcttggctcattccaagcttggccaaattggggaagtgggatggaggttgccctgcatcccccctcctctgcctgagtgtgtctttgtaatgtcagctggcatcatacaaagagcaggagaagcaaacacccagaactcttttgctggtcagagattccctgagtgtctgtcctcacccaagcctgctctgtgtctgtgttgtgaagcttgagactctggaaagaaatggggagggggggcaggggaaatgttgccctaagaatgcttctcattcctctgttcttattgggtcctgtttttcgggagggtgggggttgggggaagcttgaccttgtgtcttcgtcaataaactcacatttacacaaaatgaag

SEQ ID NO: 430 - DNA, 5454 bp, Homo sapiens
cctgcccaccatctttgtccctggcaaagtgggttttgcgcagtggcttagacctagaaaagaatcgtgacgggcaggaaaccattacaccaccacctgggctgtgctctccggctcccgccgccacccccgccctcgccttcgcctccgcctccggtgcacattaaagatccaaagtcatgactgactccaagtatttcacaaccaataaaaaaggagaaatatttgaactaaaagctgaactcaacaatgaaaagaaagaaaagagaaaggaggctgtgaagaaagtgattgctgctatgaccgtggggaaggatgttagttctctctttccagacgtagtgaactgtatgcagactgacaatctggaactaaagaagcttgtgtatctctacttgatgaactacgccaagagtcagccagacatggccatcatggctgtaaacagctttgtgaaggactgtgaagatcctaatcctttgattcgagccttggcagtcagaaccatggggtgcatccgggtagacaaaattacagaatatctctgtgagccgctccgcaagtgcttgaaggatgaggatccctatgttcggaaaacagcagcagtctgcgtggcaaaactccatgatatcaatgcccaaatggtggaagatcagggatttctggattctctacgggatctcatagcagattcaaatccaatggtggtggctaatgccgtagcggcattatctgaaatcagtgagtctcacccaaacagcaacttacttgatctgaacccacagaacattaataagctgctgacagccctgaatgaatgcactgaatggggccagattttcatcctggactgcctgtctaattacaaccctaaagatgatcgggaggctcagagcatctgtgagcgggtaactccccggctatcccatgccaactcagcagtggtgctttcagcggtaaaagtcctaatgaagtttctagaattgttacctaaggattctgactactacaatatgctgctgaagaagttagcccctccacttgtcactttgctgtctggggagccagaagtgcagtatgtcgccctgaggaacatcaacttaattgtccagaaaaggcctgaaatcttgaagcaggaaatcaaagtcttctttgtgaagtacaatgatcccatctatgttaaactagagaagttggacatcatgattcgtttggcatctcaagccaacattgctcaggttctggcagaactgaaagaatatgctacagaggtggatgttgactttgttcgaaaagctgtgcgggccattggacggtgtgccatcaaggtggaggcaaagcgctgtgtaagcacattgcttgatctaatccagaccaaagtgaattatgtggtccaagaagcaattgttgtcatcagggacatcttccgcaaataccccaacaagtatgaaagtatcatcgccactctgtgtgagaacttagactcgctggatgagccagatgctcgagcagctatgatttggattgtgggagaatatgctgaaagaattgacaatgcagatgagttactagaaagcttcctggagggttttcacgatgaaagcacccaggtgcagctcactctgcttactgccatagtgaagctgtttctcaagaaaccatcagaaacacaggagctagtccagcaggtcttgagtttggcaacacaggattctgataatcctgaccttcgagaccggggctatatttattggcgccttctctcaactgaccctgttacagctaaagaagtagtcttgtctgagaagccactgatctctgaggagacggaccttattgagccaactctgctggatgagctaatctgccacattggttctttggcctctgtgtatcataagcctcccaatgcttttgtggaaggaagtcatggaattcatcgtaaacacttgccaattcatcatgggagcactgatgcaggtgacagccctgttggcactaccactgcaacgaacctggaacagcctcaggttatcccctctcaaggtgatcttctaggggatcttttaaaccttgacctcggtcccccagtcaatgtgccacaggtgtcctccatgcagatgggagcagtggatctcctaggaggaggactagatagtctggtgggacaatccttcatcccatcatcggtgcctgcaacctttgctccttcacctacacctgctgtggtcagcagtggactgaatgacctgtttgaactctccacagggataggcatggcacctggtggatatgtggctcctaaggctgtctggctacctgcagtaaaggctaaaggcttggagatttccggaacatttactcaccgccaagggcacatctatatggaaatgaacttcaccaataaagctctgcagcacatgacagattttgcaatccagtttaacaaaaatagctttggtgtcatccccagcactcctctggccatccatacaccactgatgccaaaccagagcattgatgtctccctgcctctcaataccttgggcccagtcatgaagatggaacctctgaataacctccaggtggctgtgaaaaacaatatcgatgtcttctacttcagctgcctcatcccactcaatgtgctttttgtagaagatggcaaaatggagcgccaggtcttccttgcaacatggaaggatattcccaatgaaaatgaacttcagtttcagattaaggaatgtcatttaaatgctgacactgtttccagcaagttgcaaaacaacaatgtttatactattgccaagaggaatgtggaagggcaggacatgctgtaccaatccctgaagctcactaatggcatttggattttggccgaactacgtatccagccaggaaaccccaattacacgctgtcactgaagtgtagagctcctgaagtctctcaatacatctatcaggtctacgacagcattttgaaaaactaacaagactggtccagtacccttcaaccatgctgtgatcggtgcaagtcaagaactcttaactggaagaaattgtattgctgcgtagaatctgaacacactgaggccacctagcaaggtagtaactagtctaacctgtgctaacattagggcacaacctgttggatagttttagcttcctgtgaacatttgtaaccactgcttcagtcacctcccacctcttgccacctgctgctgctatctgtccttacttgtgggcttctccatgctgtgccaatggctggctttttctacaccctcttttgagtgtagtttggtattttgtaattgagagctcatttcaaaagcagaaaaagacaacaaatattaaagcaaggaaaagtgtaactgaaacactgcactttactgttttatacttttgtacatatgagaaatcaagggattagtgcaaccagtagaaagcattgaaatgactgtcattaaccacacagtcctggaggcagagatgcagttacctaccctagcttttgatgggttctcttacctgtagtagccttatccctggtcatttggattttcagtttgcttttttctttttttcccctccaaactccttttccttggccaagccttcatgcttccccctttccatattataatctcatttgattgctctgcagttgggaacggtgatcttcttgaatgatgtttcagtgtgcaaaaactatagagcctgtcagcaccaaagctgacagaagttataccttactcctttcctttcccctgaacaaacctgctaatcccactaattcaggaatttgagtagagatggggaacaagaacccagatgctgtcccctcaccccctctcctgtatttctcaggtccagttcaaatctaaaattctacttttagagttgaaacagagtaataacttatctaaccctcttttcctacaaaggagaaagataaaaggcacaaaggttaccgccaaggcccgtcagctgtgtagtggcaaagccgagaccgagtctcctaagtccccgtcagtgtggttttcaccacaggactgtctcttgtcgttttcccctaatgccttctcctgccttttctgtgcctagtttttggctcttcacatattccatattgattttgacgctctgtatattggcatcaggtggcagctgaatatcttttgaattactcgaaggtaaagccagatgccagaatgaaggtgtagccagtgtttcccatatgcccctggagccccacttattgaggccagcagaataggtgcagagatgaagtgagcttagagatgttgcaaatgctctttatcccttcagctctctgatctgctctttcttcatgatacttagtctgcagggcatattaagatcatcccagaggttcaggcagttcctgtcatctctgaaaagactgggggatatgaaatcttccccctaccccacttaatgcgttggatatgatttttcaaagaatgcttcatgcccaaaataccagcctgtttagcagtgttacactgtttgatctgcgggcacttgttgcattgcctggcacccaatattcagggtccatgactaagactggtcttctcagatgccctgcttaaatcaggggcacttcaggctccacaggcgtcatgttggactgagacctaactcactggactcagaggaggaatcgtggaaaacaagagcaaaactaccccacacccctatttcatgtctgaaataaccctgtttcataccaaatctccaagagaaaaatatttggggaaggagggaggaaatatgtcccttgcacaccacccctgaagcacatggcagtaggaaacagcataggattgtatgtgggaggtggataggtcggtgatgtgtggagcggaaaagcaggttggtaaagttcccttcttgggacttattcctggagtcagtggatacaagtagtgcagaaggttcacactgcaaatagtgttctcatctcaaagcaaactatcattccagaaggaaaagtgtgtcagggcaagcagacaacacaatttcctatcagaatatgtccctcaacccccgaaacaaggcttctctcagcctccccaccagtgatggataacagctcctattctcagctgacctgactgagccaacccatgaactcttcactccttggggaagccacctcccatcacacccctgagcagagttagggaggaattctacttcccataaaaggacctctcctgagaggcaaaaccttggggaagtgggatggaggttgccctgcatcccccctcctctgcctgagtgtgtctttgtaatgtcagctggcatcatacaaagagcaggagaagcaaacacccagaactcttttgctggtcagagattccctgagtgtctgtcctcacccaagcctgctctgtgtctgtgttgtgaagcttgagactctggaaa

SEQ ID NO: 431 - DNA, 5703 bp, Homo sapiens
cctgcccaccatctttgtccctggcaaagtgggttttgcgcagtggcttagacctagaaaagaatcgtgacgggcaggaaaccattacaccaccacctgggctgtgctctccggctcccgccgccacccccgccctcgccttcgcctccgcctccggtgcacattaaagatccaaagtcatgactgactccaagtatttcacaaccaataaaaaaggagaaatatttgaactaaaagctgaactcaacaatgaaaagaaagaaaagagaaaggaggctgtgaagaaagtgattgctgctatgaccgtggggaaggatgttagttctctctttccagacgtagtgaactgtatgcagactgacaatctggaactaaagaagcttgtgtatctctacttgatgaactacgccaagagtcagccagacatggccatcatggctgtaaacagctttgtgaaggactgtgaagatcctaatcctttgattcgagccttggcagtcagaaccatggggtgcatccgggtagacaaaattacagaatatctctgtgagccgctccgcaagtgcttgaaggatgaggatccctatgttcggaaaacagcagcagtctgcgtggcaaaactccatgatatcaatgcccaaatggtggaagatcagggatttctggattctctacgggatctcatagcagattcaaatccaatggtggtggctaatgccgtagcggcattatctgaaatcagtgagtctcacccaaacagcaacttacttgatctgaacccacagaacattaataagctgctgacagccctgaatgaatgcactgaatggggccagattttcatcctggactgcctgtctaattacaaccctaaagatgatcgggaggctcagagcatctgtgagcgggtaactccccggctatcccatgccaactcagcagtggtgctttcagcggtaaaagtcctaatgaagtttctagaattgttacctaaggattctgactactacaatatgctgctgaagaagttagcccctccacttgtcactttgctgtctggggagccagaagtgcagtatgtcgccctgaggaacatcaacttaattgtccagaaaaggcctgaaatcttgaagcaggaaatcaaagtcttctttgtgaagtacaatgatcccatctatgttaaactagagaagttggacatcatgattcgtttggcatctcaagccaacattgctcaggttctggcagaactgaaagaatatgctacagaggtggatgttgactttgttcgaaaagctgtgcgggccattggacggtgtgccatcaaggtggagcaatctgcagagcgctgtgtaagcacattgcttgatctaatccagaccaaagtgaattatgtggtccaagaagcaattgttgtcatcagggacatcttccgcaaataccccaacaagtatgaaagtatcatcgccactctgtgtgagaacttagactcgctggatgagccagatgctcgagcagctatgatttggattgtgggagaatatgctgaaagaattgacaatgcagatgagttactagaaagcttcctggagggttttcacgatgaaagcacccaggtgcagctcactctgcttactgccatagtgaagctgtttctcaagaaaccatcagaaacacaggagctagtccagcaggtcttgagtttggcaacacaggattctgataatcctgaccttcgagaccggggctatatttattggcgccttctctcaactgaccctgttacagctaaagaagtagtcttgtctgagaagccactgatctctgaggagacggaccttattgagccaactctgctggatgagctaatctgccacattggttctttggcctctgtgtatcataagcctcccaatgcttttgtggaaggaagtcatggaattcatcgtaaacacttgccaattcatcatgggagcactgatgcaggtgacagccctgttggcactaccactgcaacgaacctggaacagcctcaggttatcccctctcaaggtgatcttctaggggatcttttaaaccttgacctcggtcccccagtcaatgtgccacaggtgtcctccatgcagatgggagcagtggatctcctaggaggaggactagatagtctggtgggacaatccttcatcccatcatcggtgcctgcaacctttgctccttcacctacacctgctgtggtcagcagtggactgaatgacctgtttgaactctccacagggataggcatggcacctggtggatatgtggctcctaaggctgtctggctacctgcagtaaaggctaaaggcttggagatttccggaacatttactcaccgccaagggcacatctatatggaaatgaacttcaccaataaagctctgcagcacatgacagattttgcaatccagtttaactttggtgtcatccccagcactcctctggccatccatacaccactgatgccaaaccagagcattgatgtctccctgcctctcaataccttgggcccagtcatgaagatggaacctctgaataacctccaggtggctgtgaaaaacaatatcgatgtcttctacttcagctgcctcatcccactcaatgtgctttttgtagaagatggcaaaatggagcgccaggtcttccttgcaacatggaaggatattcccaatgaaaatgaacttcagtttcagattaaggaatgtcatttaaatgctgacactgtttccagcaagttgcaaaacaacaatgtttatactattgccaagaggaatgtggaagggcaggacatgctgtaccaatccctgaagctcactaatggcatttggattttggccgaactacgtatccagccaggaaaccccaattacacgctgtcactgaagtgtagagctcctgaagtctctcaatacatctatcaggtctacgacagcattttgaaaaactaacaagactggtccagtacccttcaaccatgctgtgatcggtgcaagtcaagaactcttaactggaagaaattgtattgctgcgtagaatctgaacacactgaggccacctagcaaggtagtaactagtctaacctgtgctaacattagggcacaacctgttggatagttttagcttcctgtgaacatttgtaaccactgcttcagtcacctcccacctcttgccacctgctgctgctatctgtccttacttgtgggcttctccatgctgtgccaatggctggctttttctacaccctcttttgagtgtagtttggtattttgtaattgagagctcatttcaaaagcagaaaaagacaacaaatattaaagcaaggaaaagtgtaactgaaacactgcactttactgttttatacttttgtacatatgagaaatcaagggattagtgcaaccagtagaaagcattgaaatgactgtcattaaccacacagtcctggaggcagagatgcagttacctaccctagcttttgatgggttctcttacctgtagtagccttatccctggtcatttggattttcagtttgcttttttctttttttcccctccaaactccttttccttggccaagccttcatgcttccccctttccatattataatctcatttgattgctctgcagttgggaacggtgatcttcttgaatgatgtttcagtgtgcaaaaactatagagcctgtcagcaccaaagctgacagaagttataccttactcctttcctttcccctgaacaaacctgctaatcccactaattcaggaatttgagtagagatggggaacaagaacccagatgctgtcccctcaccccctctcctgtatttctcaggtccagttcaaatctaaaattctacttttagagttgaaacagagtaataacttatctaaccctcttttcctacaaaggagaaagataaaaggcacaaaggttaccgccaaggcccgtcagctgtgtagtggcaaagccgagaccgagtctcctaagtccccgtcagtgtggttttcaccacaggactgtctcttgtcgttttcccctaatgccttctcctgccttttctgtgcctagtttttggctcttcacatattccatattgattttgacgctctgtatattggcatcaggtggcagctgaatatcttttgaattactcgaaggtaaagccagatgccagaatgaaggtgtagccagtgtttcccatatgcccctggagccccacttattgaggccagcagaataggtgcagagatgaagtgagcttagagatgttgcaaatgctctttatcccttcagctctctgatctgctctttcttcatgatacttagtctgcagggcatattaagatcatcccagaggttcaggcagttcctgtcatctctgaaaagactgggggatatgaaatcttccccctaccccacttaatgcgttggatatgatttttcaaagaatgcttcatgcccaaaataccagcctgtttagcagtgttacactgtttgatctgcgggcacttgttgcattgcctggcacccaatattcagggtccatgactaagactggtcttctcagatgccctgcttaaatcaggggcacttcaggctccacaggcgtcatgttggactgagacctaactcactggactcagaggaggaatcgtggaaaacaagagcaaaactaccccacacccctatttcatgtctgaaataaccctgtttcataccagttgcaaagcttgtggggagcggtcccacaaagcactttcttaaaccttgagaatctccaagagaaaaatatttggggaaggagggaggaaatatgtcccttgcacaccacccctgaagcacatggcagtaggaaacagcataggattgtatgtgggaggtggataggtcggtgatgtgtggagcggaaaagcaggttggtaaagttcccttcttgggacttattcctggagtcagtggatacaagtagtgcagaaggttcacactgcaaatagtgttctcatctcaaagcaaactatcattccagaaggaaaagtgtgtcagggcaagcagacaacacaatttcctatcagaatatgtccctcaacccccgaaacaaggcttctctcagcctccccaccagtgatggataacagctcctattctcagctgacctgactgagccaacccatgaactcttcactccttggggaagccacctcccatcacacccctgagcagagttagggaggaattctacttcccataaaaggacctctcctgagaggcaaaacctgttgcctccaccacggcttccctcttggctcattccaagcttggccaaattggggaagtgggatggaggttgccctgcatcccccctcctctgcctgagtgtgtctttgtaatgtcagctggcatcatacaaagagcaggagaagcaaacacccagaactcttttgctggtcagagattccctgagtgtctgtcctcacccaagcctgctctgtgtctgtgttgtgaagcttgagactctggaaagaaatggggagggggggcaggggaaatgttgccctaagaatgcttctcattcctctgttcttattgggtcctgtttttcgggagggtgggggttgggggaagcttgaccttgtgtcttcgtcaataaactcacatttacacaaaatgaag

SEQ ID NO: 432 - DNA, 5585 bp, Homo sapiens
aaccattacaccaccacctgggctgtgctctccggctggtgcacattaaagatccaaagtcatgactgactccaagtatttcacaaccaataaaaaaggagaaatatttgaactaaaagctgaactcaacaatgaaaagaaagaaaagagaaaggaggctgtgaagaaagtgattgctgctatgaccgtggggaaggatgttagttctctctttccagacgtagtgaactgtatgcagactgacaatctggaactaaagaagcttgtgtatctctacttgatgaactacgccaagagtcagccagacatggccatcatggctgtaaacagctttgtgaaggactgtgaagatcctaatcctttgattcgagccttggcagtcagaaccatggggtgcatccgggtagacaaaattacagaatatctctgtgagccgctccgcaagtgcttgaaggatgaggatccctatgttcggaaaacagcagcagtctgcgtggcaaaactccatgatatcaatgcccaaatggtggaagatcagggatttctggattctctacgggatctcatagcagattcaaatccaatggtggtggctaatgccgtagcggcattatctgaaatcagtgagtctcacccaaacagcaacttacttgatctgaacccacagaacattaataagctgctgacagccctgaatgaatgcactgaatggggccagattttcatcctggactgcctgtctaattacaaccctaaagatgatcgggaggctcagagcatctgtgagcgggtaactccccggctatcccatgccaactcagcagtggtgctttcagcggtaaaagtcctaatgaagtttctagaattgttacctaaggattctgactactacaatatgctgctgaagaagttagcccctccacttgtcactttgctgtctggggagccagaagtgcagtatgtcgccctgaggaacatcaacttaattgtccagaaaaggcctgaaatcttgaagcaggaaatcaaagtcttctttgtgaagtacaatgatcccatctatgttaaactagagaagttggacatcatgattcgtttggcatctcaagccaacattgctcaggttctggcagaactgaaagaatatgctacagaggtggatgttgactttgttcgaaaagctgtgcgggccattggacggtgtgccatcaaggtggagcaatctgcagagcgctgtgtaagcacattgcttgatctaatccagaccaaagtgaattatgtggtccaagaagcaattgttgtcatcagggacatcttccgcaaataccccaacaagtatgaaagtatcatcgccactctgtgtgagaacttagactcgctggatgagccagatgctcgagcagctatgatttggattgtgggagaatatgctgaaagaattgacaatgcagatgagttactagaaagcttcctggagggttttcacgatgaaagcacccaggtgcagctcactctgcttactgccatagtgaagctgtttctcaagaaaccatcagaaacacaggagctagtccagcaggtcttgagtttggcaacacaggattctgataatcctgaccttcgagaccggggctatatttattggcgccttctctcaactgaccctgttacagctaaagaagtagtcttgtctgagaagccactgatctctgaggagacggaccttattgagccaactctgctggatgagctaatctgccacattggttctttggcctctgtgtatcataagcctcccaatgcttttgtggaaggaagtcatggaattcatcgtaaacacttgccaattcatcatgggagcactgatgcaggtgacagccctgttggcactaccactgcaacgaacctggaacagcctcaggttatcccctctcaaggtgatcttctaggggatcttttaaaccttgacctcggtcccccagtcaatgtgccacaggtgtcctccatgcagatgggagcagtggatctcctaggaggaggactagatagtctggtgggacaatccttcatcccatcatcggtgcctgcaacctttgctccttcacctacacctgctgtggtcagcagtggactgaatgacctgtttgaactctccacagggataggcatggcacctggtggatatgtggctcctaaggctgtctggctacctgcagtaaaggctaaaggcttggagatttccggaacatttactcaccgccaagggcacatctatatggaaatgaacttcaccaataaagctctgcagcacatgacagattttgcaatccagtttaactttggtgtcatccccagcactcctctggccatccatacaccactgatgccaaaccagagcattgatgtctccctgcctctcaataccttgggcccagtcatgaagatggaacctctgaataacctccaggtggctgtgaaaaacaatatcgatgtcttctacttcagctgcctcatcccactcaatgtgctttttgtagaagatggcaaaatggagcgccaggtcttccttgcaacatggaaggatattcccaatgaaaatgaacttcagtttcagattaaggaatgtcatttaaatgctgacactgtttccagcaagttgcaaaacaacaatgtttatactattgccaagaggaatgtggaagggcaggacatgctgtaccaatccctgaagctcactaatggcatttggattttggccgaactacgtatccagccaggaaaccccaattacacgctgtcactgaagtgtagagctcctgaagtctctcaatacatctatcaggtctacgacagcattttgaaaaactaacaagactggtccagtacccttcaaccatgctgtgatcggtgcaagtcaagaactcttaactggaagaaattgtattgctgcgtagaatctgaacacactgaggccacctagcaaggtagtaactagtctaacctgtgctaacattagggcacaacctgttggatagttttagcttcctgtgaacatttgtaaccactgcttcagtcacctcccacctcttgccacctgctgctgctatctgtccttacttgtgggcttctccatgctgtgccaatggctggctttttctacaccctcttttgagtgtagtttggtattttgtaattgagagctcatttcaaaagcagaaaaagacaacaaatattaaagcaaggaaaagtgtaactgaaacactgcactttactgttttatacttttgtacatatgagaaatcaagggattagtgcaaccagtagaaagcattgaaatgactgtcattaaccacacagtcctggaggcagagatgcagttacctaccctagcttttgatgggttctcttacctgtagtagccttatccctggtcatttggattttcagtttgcttttttctttttttcccctccaaactccttttccttggccaagccttcatgcttccccctttccatattataatctcatttgattgctctgcagttgggaacggtgatcttcttgaatgatgtttcagtgtgcaaaaactatagagcctgtcagcaccaaagctgacagaagttataccttactcctttcctttcccctgaacaaacctgctaatcccactaattcaggaatttgagtagagatggggaacaagaacccagatgctgtcccctcaccccctctcctgtatttctcaggtccagttcaaatctaaaattctacttttagagttgaaacagagtaataacttatctaaccctcttttcctacaaaggagaaagataaaaggcacaaaggttaccgccaaggcccgtcagctgtgtagtggcaaagccgagaccgagtctcctaagtccccgtcagtgtggttttcaccacaggactgtctcttgtcgttttcccctaatgccttctcctgccttttctgtgcctagtttttggctcttcacatattccatattgattttgacgctctgtatattggcatcaggtggcagctgaatatcttttgaattactcgaaggtaaagccagatgccagaatgaaggtgtagccagtgtttcccatatgcccctggagccccacttattgaggccagcagaataggtgcagagatgaagtgagcttagagatgttgcaaatgctctttatcccttcagctctctgatctgctctttcttcatgatacttagtctgcagggcatattaagatcatcccagaggttcaggcagttcctgtcatctctgaaaagactgggggatatgaaatcttccccctaccccacttaatgcgttggatatgatttttcaaagaatgcttcatgcccaaaataccagcctgtttagcagtgttacactgtttgatctgcgggcacttgttgcattgcctggcacccaatattcagggtccatgactaagactggtcttctcagatgccctgcttaaatcaggggcacttcaggctccacaggcgtcatgttggactgagacctaactcactggactcagaggaggaatcgtggaaaacaagagcaaaactaccccacacccctatttcatgtctgaaataaccctgtttcataccagttgcaaagcttgtggggagcggtcccacaaagcactttcttaaaccttgagaatctccaagagaaaaatatttggggaaggagggaggaaatatgtcccttgcacaccacccctgaagcacatggcagtaggaaacagcataggattgtatgtgggaggtggataggtcggtgatgtgtggagcggaaaagcaggttggtaaagttcccttcttgggacttattcctggagtcagtggatacaagtagtgcagaaggttcacactgcaaatagtgttctcatctcaaagcaaactatcattccagaaggaaaagtgtgtcagggcaagcagacaacacaatttcctatcagaatatgtccctcaacccccgaaacaaggcttctctcagcctccccaccagtgatggataacagctcctattctcagctgacctgactgagccaacccatgaactcttcactccttggggaagccacctcccatcacacccctgagcagagttagggaggaattctacttcccataaaaggacctctcctgagaggcaaaacctgttgcctccaccacggcttccctcttggctcattccaagcttggccaaattggggaagtgggatggaggttgccctgcatcccccctcctctgcctgagtgtgtctttgtaatgtcagctggcatcatacaaagagcaggagaagcaaacacccagaactcttttgctggtcagagattccctgagtgtctgtcctcacccaagcctgctctgtgtctgtgttgtgaagcttgagactctggaaagaaatggggagggggggcaggggaaatgttgccctaagaatgcttctcattcctctgttcttattgggtcctgtttttcgggagggtgggggttgggggaagcttgaccttgtgtcttcgtcaataaactcacatttacacaaaatgaag

SEQ ID NO: 433 - DNA, 5743 bp, Homo sapiens
cctttagggtgtgtccctaattgacggggtcggggacggagagaagggtaacaccaggctgggtcggagaccggcggaggcgaggaaatcctaagagcgtgaccgttgatgatgcagggaaccgtcgggtgtgaccattgagagggaaaaggtgcacattaaagatccaaagtcatgactgactccaagtatttcacaaccaataaaaaaggagaaatatttgaactaaaagctgaactcaacaatgaaaagaaagaaaagagaaaggaggctgtgaagaaagtgattgctgctatgaccgtggggaaggatgttagttctctctttccagacgtagtgaactgtatgcagactgacaatctggaactaaagaagcttgtgtatctctacttgatgaactacgccaagagtcagccagacatggccatcatggctgtaaacagctttgtgaaggactgtgaagatcctaatcctttgattcgagccttggcagtcagaaccatggggtgcatccgggtagacaaaattacagaatatctctgtgagccgctccgcaagtgcttgaaggatgaggatccctatgttcggaaaacagcagcagtctgcgtggcaaaactccatgatatcaatgcccaaatggtggaagatcagggatttctggattctctacgggatctcatagcagattcaaatccaatggtggtggctaatgccgtagcggcattatctgaaatcagtgagtctcacccaaacagcaacttacttgatctgaacccacagaacattaataagctgctgacagccctgaatgaatgcactgaatggggccagattttcatcctggactgcctgtctaattacaaccctaaagatgatcgggaggctcagagcatctgtgagcgggtaactccccggctatcccatgccaactcagcagtggtgctttcagcggtaaaagtcctaatgaagtttctagaattgttacctaaggattctgactactacaatatgctgctgaagaagttagcccctccacttgtcactttgctgtctggggagccagaagtgcagtatgtcgccctgaggaacatcaacttaattgtccagaaaaggcctgaaatcttgaagcaggaaatcaaagtcttctttgtgaagtacaatgatcccatctatgttaaactagagaagttggacatcatgattcgtttggcatctcaagccaacattgctcaggttctggcagaactgaaagaatatgctacagaggtggatgttgactttgttcgaaaagctgtgcgggccattggacggtgtgccatcaagcaatctgcagagcgctgtgtaagcacattgcttgatctaatccagaccaaagtgaattatgtggtccaagaagcaattgttgtcatcagggacatcttccgcaaataccccaacaagtatgaaagtatcatcgccactctgtgtgagaacttagactcgctggatgagccagatgctcgagcagctatgatttggattgtgggagaatatgctgaaagaattgacaatgcagatgagttactagaaagcttcctggagggttttcacgatgaaagcacccaggtgcagctcactctgcttactgccatagtgaagctgtttctcaagaaaccatcagaaacacaggagctagtccagcaggtcttgagtttggcaacacaggattctgataatcctgaccttcgagaccggggctatatttattggcgccttctctcaactgaccctgttacagctaaagaagtagtcttgtctgagaagccactgatctctgaggagacggaccttattgagccaactctgctggatgagctaatctgccacattggttctttggcctctgtgtatcataagcctcccaatgcttttgtggaaggaagtcatggaattcatcgtaaacacttgccaattcatcatgggagcactgatgcaggtgacagccctgttggcactaccactgcaacgaacctggaacagcctcaggttatcccctctcaaggtgatcttctaggggatcttttaaaccttgacctcggtcccccagtcaatgtgccacaggtgtcctccatgcagatgggagcagtggatctcctaggaggaggactagatagtctgcttggcagtgaccttggcgggggcattggaggaagtccggcagtgggacaatccttcatcccatcatcggtgcctgcaacctttgctccttcacctacacctgctgtggtcagcagtggactgaatgacctgtttgaactctccacagggataggcatggcacctggtggatatgtggctcctaaggctgtctggctacctgcagtaaaggctaaaggcttggagatttccggaacatttactcaccgccaagggcacatctatatggaaatgaacttcaccaataaagctctgcagcacatgacagattttgcaatccagtttaacaaaaatagctttggtgtcatccccagcactcctctggccatccatacaccactgatgccaaaccagagcattgatgtctccctgcctctcaataccttgggcccagtcatgaagatggaacctctgaataacctccaggtggctgtgaaaaacaatatcgatgtcttctacttcagctgcctcatcccactcaatgtgctttttgtagaagatggcaaaatggagcgccaggtcttccttgcaacatggaaggatattcccaatgaaaatgaacttcagtttcagattaaggaatgtcatttaaatgctgacactgtttccagcaagttgcaaaacaacaatgtttatactattgccaagaggaatgtggaagggcaggacatgctgtaccaatccctgaagctcactaatggcatttggattttggccgaactacgtatccagccaggaaaccccaattacacgctgtcactgaagtgtagagctcctgaagtctctcaatacatctatcaggtctacgacagcattttgaaaaactaacaagactggtccagtacccttcaaccatgctgtgatcggtgcaagtcaagaactcttaactggaagaaattgtattgctgcgtagaatctgaacacactgaggccacctagcaaggtagtaactagtctaacctgtgctaacattagggcacaacctgttggatagttttagcttcctgtgaacatttgtaaccactgcttcagtcacctcccacctcttgccacctgctgctgctatctgtccttacttgtgggcttctccatgctgtgccaatggctggctttttctacaccctcttttgagtgtagtttggtattttgtaattgagagctcatttcaaaagcagaaaaagacaacaaatattaaagcaaggaaaagtgtaactgaaacactgcactttactgttttatacttttgtacatatgagaaatcaagggattagtgcaaccagtagaaagcattgaaatgactgtcattaaccacacagtcctggaggcagagatgcagttacctaccctagcttttgatgggttctcttacctgtagtagccttatccctggtcatttggattttcagtttgcttttttctttttttcccctccaaactccttttccttggccaagccttcatgcttccccctttccatattataatctcatttgattgctctgcagttgggaacggtgatcttcttgaatgatgtttcagtgtgcaaaaactatagagcctgtcagcaccaaagctgacagaagttataccttactcctttcctttcccctgaacaaacctgctaatcccactaattcaggaatttgagtagagatggggaacaagaacccagatgctgtcccctcaccccctctcctgtatttctcaggtccagttcaaatctaaaattctacttttagagttgaaacagagtaataacttatctaaccctcttttcctacaaaggagaaagataaaaggcacaaaggttaccgccaaggcccgtcagctgtgtagtggcaaagccgagaccgagtctcctaagtccccgtcagtgtggttttcaccacaggactgtctcttgtcgttttcccctaatgccttctcctgccttttctgtgcctagtttttggctcttcacatattccatattgattttgacgctctgtatattggcatcaggtggcagctgaatatcttttgaattactcgaaggtaaagccagatgccagaatgaaggtgtagccagtgtttcccatatgcccctggagccccacttattgaggccagcagaataggtgcagagatgaagtgagcttagagatgttgcaaatgctctttatcccttcagctctctgatctgctctttcttcatgatacttagtctgcagggcatattaagatcatcccagaggttcaggcagttcctgtcatctctgaaaagactgggggatatgaaatcttccccctaccccacttaatgcgttggatatgatttttcaaagaatgcttcatgcccaaaataccagcctgtttagcagtgttacactgtttgatctgcgggcacttgttgcattgcctggcacccaatattcagggtccatgactaagactggtcttctcagatgccctgcttaaatcaggggcacttcaggctccacaggcgtcatgttggactgagacctaactcactggactcagaggaggaatcgtggaaaacaagagcaaaactaccccacacccctatttcatgtctgaaataaccctgtttcataccagttgcaaagcttgtggggagcggtcccacaaagcactttcttaaaccttgagaatctccaagagaaaaatatttggggaaggagggaggaaatatgtcccttgcacaccacccctgaagcacatggcagtaggaaacagcataggattgtatgtgggaggtggataggtcggtgatgtgtggagcggaaaagcaggttggtaaagttcccttcttgggacttattcctggagtcagtggatacaagtagtgcagaaggttcacactgcaaatagtgttctcatctcaaagcaaactatcattccagaaggaaaagtgtgtcagggcaagcagacaacacaatttcctatcagaatatgtccctcaacccccgaaacaaggcttctctcagcctccccaccagtgatggataacagctcctattctcagctgacctgactgagccaacccatgaactcttcactccttggggaagccacctcccatcacacccctgagcagagttagggaggaattctacttcccataaaaggacctctcctgagaggcaaaacctgttgcctccaccacggcttccctcttggctcattccaagcttggccaaattggggaagtgggatggaggttgccctgcatcccccctcctctgcctgagtgtgtctttgtaatgtcagctggcatcatacaaagagcaggagaagcaaacacccagaactcttttgctggtcagagattccctgagtgtctgtcctcacccaagcctgctctgtgtctgtgttgtgaagcttgagactctggaaagaaatggggagggggggcaggggaaatgttgccctaagaatgcttctcattcctctgttcttattgggtcctgtttttcgggagggtgggggttgggggaagcttgaccttgtgtcttcgtcaataaactcacatttacacaaaatgaag

SEQ ID NO: 434 - DNA, 5743 bp, Homo sapiens
cctttagggtgtgtccctaattgacggggtcggggacggagagaagggtaacaccaggctgggtcggagaccggcggaggcgaggaaatcctaagagcgtgaccgttgatgatgcagggaaccgtcgggtgtgaccattgagagggaaaaggtgcacattaaagatccaaagtcatgactgactccaagtatttcacaaccaataaaaaaggagaaatatttgaactaaaagctgaactcaacaatgaaaagaaagaaaagagaaaggaggctgtgaagaaagtgattgctgctatgaccgtggggaaggatgttagttctctctttccagacgtagtgaactgtatgcagactgacaatctggaactaaagaagcttgtgtatctctacttgatgaactacgccaagagtcagccagacatggccatcatggctgtaaacagctttgtgaaggactgtgaagatcctaatcctttgattcgagccttggcagtcagaaccatggggtgcatccgggtagacaaaattacagaatatctctgtgagccgctccgcaagtgcttgaaggatgaggatccctatgttcggaaaacagcagcagtctgcgtggcaaaactccatgatatcaatgcccaaatggtggaagatcagggatttctggattctctacgggatctcatagcagattcaaatccaatggtggtggctaatgccgtagcggcattatctgaaatcagtgagtctcacccaaacagcaacttacttgatctgaacccacagaacattaataagctgctgacagccctgaatgaatgcactgaatggggccagattttcatcctggactgcctgtctaattacaaccctaaagatgatcgggaggctcagagcatctgtgagcgggtaactccccggctatcccatgccaactcagcagtggtgctttcagcggtaaaagtcctaatgaagtttctagaattgttacctaaggattctgactactacaatatgctgctgaagaagttagcccctccacttgtcactttgctgtctggggagccagaagtgcagtatgtcgccctgaggaacatcaacttaattgtccagaaaaggcctgaaatcttgaagcaggaaatcaaagtcttctttgtgaagtacaatgatcccatctatgttaaactagagaagttggacatcatgattcgtttggcatctcaagccaacattgctcaggttctggcagaactgaaagaatatgctacagaggtggatgttgactttgttcgaaaagctgtgcgggccattggacggtgtgccatcaaggtggaggcaaagcgctgtgtaagcacattgcttgatctaatccagaccaaagtgaattatgtggtccaagaagcaattgttgtcatcagggacatcttccgcaaataccccaacaagtatgaaagtatcatcgccactctgtgtgagaacttagactcgctggatgagccagatgctcgagcagctatgatttggattgtgggagaatatgctgaaagaattgacaatgcagatgagttactagaaagcttcctggagggttttcacgatgaaagcacccaggtgcagctcactctgcttactgccatagtgaagctgtttctcaagaaaccatcagaaacacaggagctagtccagcaggtcttgagtttggcaacacaggattctgataatcctgaccttcgagaccggggctatatttattggcgccttctctcaactgaccctgttacagctaaagaagtagtcttgtctgagaagccactgatctctgaggagacggaccttattgagccaactctgctggatgagctaatctgccacattggttctttggcctctgtgtatcataagcctcccaatgcttttgtggaaggaagtcatggaattcatcgtaaacacttgccaattcatcatgggagcactgatgcaggtgacagccctgttggcactaccactgcaacgaacctggaacagcctcaggttatcccctctcaaggtgatcttctaggggatcttttaaaccttgacctcggtcccccagtcaatgtgccacaggtgtcctccatgcagatgggagcagtggatctcctaggaggaggactagatagtctgcttggcagtgaccttggcgggggcattggaggaagtccggcagtgggacaatccttcatcccatcatcggtgcctgcaacctttgctccttcacctacacctgctgtggtcagcagtggactgaatgacctgtttgaactctccacagggataggcatggcacctggtggatatgtggctcctaaggctgtctggctacctgcagtaaaggctaaaggcttggagatttccggaacatttactcaccgccaagggcacatctatatggaaatgaacttcaccaataaagctctgcagcacatgacagattttgcaatccagtttaacaaaaatagctttggtgtcatccccagcactcctctggccatccatacaccactgatgccaaaccagagcattgatgtctccctgcctctcaataccttgggcccagtcatgaagatggaacctctgaataacctccaggtggctgtgaaaaacaatatcgatgtcttctacttcagctgcctcatcccactcaatgtgctttttgtagaagatggcaaaatggagcgccaggtcttccttgcaacatggaaggatattcccaatgaaaatgaacttcagtttcagattaaggaatgtcatttaaatgctgacactgtttccagcaagttgcaaaacaacaatgtttatactattgccaagaggaatgtggaagggcaggacatgctgtaccaatccctgaagctcactaatggcatttggattttggccgaactacgtatccagccaggaaaccccaattacacgctgtcactgaagtgtagagctcctgaagtctctcaatacatctatcaggtctacgacagcattttgaaaaactaacaagactggtccagtacccttcaaccatgctgtgatcggtgcaagtcaagaactcttaactggaagaaattgtattgctgcgtagaatctgaacacactgaggccacctagcaaggtagtaactagtctaacctgtgctaacattagggcacaacctgttggatagttttagcttcctgtgaacatttgtaaccactgcttcagtcacctcccacctcttgccacctgctgctgctatctgtccttacttgtgggcttctccatgctgtgccaatggctggctttttctacaccctcttttgagtgtagtttggtattttgtaattgagagctcatttcaaaagcagaaaaagacaacaaatattaaagcaaggaaaagtgtaactgaaacactgcactttactgttttatacttttgtacatatgagaaatcaagggattagtgcaaccagtagaaagcattgaaatgactgtcattaaccacacagtcctggaggcagagatgcagttacctaccctagcttttgatgggttctcttacctgtagtagccttatccctggtcatttggattttcagtttgcttttttctttttttcccctccaaactccttttccttggccaagccttcatgcttccccctttccatattataatctcatttgattgctctgcagttgggaacggtgatcttcttgaatgatgtttcagtgtgcaaaaactatagagcctgtcagcaccaaagctgacagaagttataccttactcctttcctttcccctgaacaaacctgctaatcccactaattcaggaatttgagtagagatggggaacaagaacccagatgctgtcccctcaccccctctcctgtatttctcaggtccagttcaaatctaaaattctacttttagagttgaaacagagtaataacttatctaaccctcttttcctacaaaggagaaagataaaaggcacaaaggttaccgccaaggcccgtcagctgtgtagtggcaaagccgagaccgagtctcctaagtccccgtcagtgtggttttcaccacaggactgtctcttgtcgttttcccctaatgccttctcctgccttttctgtgcctagtttttggctcttcacatattccatattgattttgacgctctgtatattggcatcaggtggcagctgaatatcttttgaattactcgaaggtaaagccagatgccagaatgaaggtgtagccagtgtttcccatatgcccctggagccccacttattgaggccagcagaataggtgcagagatgaagtgagcttagagatgttgcaaatgctctttatcccttcagctctctgatctgctctttcttcatgatacttagtctgcagggcatattaagatcatcccagaggttcaggcagttcctgtcatctctgaaaagactgggggatatgaaatcttccccctaccccacttaatgcgttggatatgatttttcaaagaatgcttcatgcccaaaataccagcctgtttagcagtgttacactgtttgatctgcgggcacttgttgcattgcctggcacccaatattcagggtccatgactaagactggtcttctcagatgccctgcttaaatcaggggcacttcaggctccacaggcgtcatgttggactgagacctaactcactggactcagaggaggaatcgtggaaaacaagagcaaaactaccccacacccctatttcatgtctgaaataaccctgtttcataccagttgcaaagcttgtggggagcggtcccacaaagcactttcttaaaccttgagaatctccaagagaaaaatatttggggaaggagggaggaaatatgtcccttgcacaccacccctgaagcacatggcagtaggaaacagcataggattgtatgtgggaggtggataggtcggtgatgtgtggagcggaaaagcaggttggtaaagttcccttcttgggacttattcctggagtcagtggatacaagtagtgcagaaggttcacactgcaaatagtgttctcatctcaaagcaaactatcattccagaaggaaaagtgtgtcagggcaagcagacaacacaatttcctatcagaatatgtccctcaacccccgaaacaaggcttctctcagcctccccaccagtgatggataacagctcctattctcagctgacctgactgagccaacccatgaactcttcactccttggggaagccacctcccatcacacccctgagcagagttagggaggaattctacttcccataaaaggacctctcctgagaggcaaaacctgttgcctccaccacggcttccctcttggctcattccaagcttggccaaattggggaagtgggatggaggttgccctgcatcccccctcctctgcctgagtgtgtctttgtaatgtcagctggcatcatacaaagagcaggagaagcaaacacccagaactcttttgctggtcagagattccctgagtgtctgtcctcacccaagcctgctctgtgtctgtgttgtgaagcttgagactctggaaagaaatggggagggggggcaggggaaatgttgccctaagaatgcttctcattcctctgttcttattgggtcctgtttttcgggagggtgggggttgggggaagcttgaccttgtgtcttcgtcaataaactcacatttacacaaaatgaag

SEQ ID NO: 435 - DNA, 5496 bp, Homo sapiens
cctgcccaccatctttgtccctggcaaagtgggttttgcgcagtggcttagacctagaaaagaatcgtgacgggcaggaaaccattacaccaccacctgggctgtgctctccggctcccgccgccacccccgccctcgccttcgcctccgcctccggtgcacattaaagatccaaagtcatgactgactccaagtatttcacaaccaataaaaaaggagaaatatttgaactaaaagctgaactcaacaatgaaaagaaagaaaagagaaaggaggctgtgaagaaagtgattgctgctatgaccgtggggaaggatgttagttctctctttccagacgtagtgaactgtatgcagactgacaatctggaactaaagaagcttgtgtatctctacttgatgaactacgccaagagtcagccagacatggccatcatggctgtaaacagctttgtgaaggactgtgaagatcctaatcctttgattcgagccttggcagtcagaaccatggggtgcatccgggtagacaaaattacagaatatctctgtgagccgctccgcaagtgcttgaaggatgaggatccctatgttcggaaaacagcagcagtctgcgtggcaaaactccatgatatcaatgcccaaatggtggaagatcagggatttctggattctctacgggatctcatagcagattcaaatccaatggtggtggctaatgccgtagcggcattatctgaaatcagtgagtctcacccaaacagcaacttacttgatctgaacccacagaacattaataagctgctgacagccctgaatgaatgcactgaatggggccagattttcatcctggactgcctgtctaattacaaccctaaagatgatcgggaggctcagagcatctgtgagcgggtaactccccggctatcccatgccaactcagcagtggtgctttcagcggtaaaagtcctaatgaagtttctagaattgttacctaaggattctgactactacaatatgctgctgaagaagttagcccctccacttgtcactttgctgtctggggagccagaagtgcagtatgtcgccctgaggaacatcaacttaattgtccagaaaaggcctgaaatcttgaagcaggaaatcaaagtcttctttgtgaagtacaatgatcccatctatgttaaactagagaagttggacatcatgattcgtttggcatctcaagccaacattgctcaggttctggcagaactgaaagaatatgctacagaggtggatgttgactttgttcgaaaagctgtgcgggccattggacggtgtgccatcaaggtggaggcaaagcgctgtgtaagcacattgcttgatctaatccagaccaaagtgaattatgtggtccaagaagcaattgttgtcatcagggacatcttccgcaaataccccaacaagtatgaaagtatcatcgccactctgtgtgagaacttagactcgctggatgagccagatgctcgagcagctatgatttggattgtgggagaatatgctgaaagaattgacaatgcagatgagttactagaaagcttcctggagggttttcacgatgaaagcacccaggtgcagctcactctgcttactgccatagtgaagctgtttctcaagaaaccatcagaaacacaggagctagtccagcaggtcttgagtttggcaacacaggattctgataatcctgaccttcgagaccggggctatatttattggcgccttctctcaactgaccctgttacagctaaagaagtagtcttgtctgagaagccactgatctctgaggagacggaccttattgagccaactctgctggatgagctaatctgccacattggttctttggcctctgtgtatcataagcctcccaatgcttttgtggaaggaagtcatggaattcatcgtaaacacttgccaattcatcatgggagcactgatgcaggtgacagccctgttggcactaccactgcaacgaacctggaacagcctcaggttatcccctctcaaggtgatcttctaggggatcttttaaaccttgacctcggtcccccagtcaatgtgccacaggtgtcctccatgcagatgggagcagtggatctcctaggaggaggactagatagtctgcttggcagtgaccttggcgggggcattggaggaagtccggcagtgggacaatccttcatcccatcatcggtgcctgcaacctttgctccttcacctacacctgctgtggtcagcagtggactgaatgacctgtttgaactctccacagggataggcatggcacctggtggatatgtggctcctaaggctgtctggctacctgcagtaaaggctaaaggcttggagatttccggaacatttactcaccgccaagggcacatctatatggaaatgaacttcaccaataaagctctgcagcacatgacagattttgcaatccagtttaacaaaaatagctttggtgtcatccccagcactcctctggccatccatacaccactgatgccaaaccagagcattgatgtctccctgcctctcaataccttgggcccagtcatgaagatggaacctctgaataacctccaggtggctgtgaaaaacaatatcgatgtcttctacttcagctgcctcatcccactcaatgtgctttttgtagaagatggcaaaatggagcgccaggtcttccttgcaacatggaaggatattcccaatgaaaatgaacttcagtttcagattaaggaatgtcatttaaatgctgacactgtttccagcaagttgcaaaacaacaatgtttatactattgccaagaggaatgtggaagggcaggacatgctgtaccaatccctgaagctcactaatggcatttggattttggccgaactacgtatccagccaggaaaccccaattacacgctgtcactgaagtgtagagctcctgaagtctctcaatacatctatcaggtctacgacagcattttgaaaaactaacaagactggtccagtacccttcaaccatgctgtgatcggtgcaagtcaagaactcttaactggaagaaattgtattgctgcgtagaatctgaacacactgaggccacctagcaaggtagtaactagtctaacctgtgctaacattagggcacaacctgttggatagttttagcttcctgtgaacatttgtaaccactgcttcagtcacctcccacctcttgccacctgctgctgctatctgtccttacttgtgggcttctccatgctgtgccaatggctggctttttctacaccctcttttgagtgtagtttggtattttgtaattgagagctcatttcaaaagcagaaaaagacaacaaatattaaagcaaggaaaagtgtaactgaaacactgcactttactgttttatacttttgtacatatgagaaatcaagggattagtgcaaccagtagaaagcattgaaatgactgtcattaaccacacagtcctggaggcagagatgcagttacctaccctagcttttgatgggttctcttacctgtagtagccttatccctggtcatttggattttcagtttgcttttttctttttttcccctccaaactccttttccttggccaagccttcatgcttccccctttccatattataatctcatttgattgctctgcagttgggaacggtgatcttcttgaatgatgtttcagtgtgcaaaaactatagagcctgtcagcaccaaagctgacagaagttataccttactcctttcctttcccctgaacaaacctgctaatcccactaattcaggaatttgagtagagatggggaacaagaacccagatgctgtcccctcaccccctctcctgtatttctcaggtccagttcaaatctaaaattctacttttagagttgaaacagagtaataacttatctaaccctcttttcctacaaaggagaaagataaaaggcacaaaggttaccgccaaggcccgtcagctgtgtagtggcaaagccgagaccgagtctcctaagtccccgtcagtgtggttttcaccacaggactgtctcttgtcgttttcccctaatgccttctcctgccttttctgtgcctagtttttggctcttcacatattccatattgattttgacgctctgtatattggcatcaggtggcagctgaatatcttttgaattactcgaaggtaaagccagatgccagaatgaaggtgtagccagtgtttcccatatgcccctggagccccacttattgaggccagcagaataggtgcagagatgaagtgagcttagagatgttgcaaatgctctttatcccttcagctctctgatctgctctttcttcatgatacttagtctgcagggcatattaagatcatcccagaggttcaggcagttcctgtcatctctgaaaagactgggggatatgaaatcttccccctaccccacttaatgcgttggatatgatttttcaaagaatgcttcatgcccaaaataccagcctgtttagcagtgttacactgtttgatctgcgggcacttgttgcattgcctggcacccaatattcagggtccatgactaagactggtcttctcagatgccctgcttaaatcaggggcacttcaggctccacaggcgtcatgttggactgagacctaactcactggactcagaggaggaatcgtggaaaacaagagcaaaactaccccacacccctatttcatgtctgaaataaccctgtttcataccaaatctccaagagaaaaatatttggggaaggagggaggaaatatgtcccttgcacaccacccctgaagcacatggcagtaggaaacagcataggattgtatgtgggaggtggataggtcggtgatgtgtggagcggaaaagcaggttggtaaagttcccttcttgggacttattcctggagtcagtggatacaagtagtgcagaaggttcacactgcaaatagtgttctcatctcaaagcaaactatcattccagaaggaaaagtgtgtcagggcaagcagacaacacaatttcctatcagaatatgtccctcaacccccgaaacaaggcttctctcagcctccccaccagtgatggataacagctcctattctcagctgacctgactgagccaacccatgaactcttcactccttggggaagccacctcccatcacacccctgagcagagttagggaggaattctacttcccataaaaggacctctcctgagaggcaaaaccttggggaagtgggatggaggttgccctgcatcccccctcctctgcctgagtgtgtctttgtaatgtcagctggcatcatacaaagagcaggagaagcaaacacccagaactcttttgctggtcagagattccctgagtgtctgtcctcacccaagcctgctctgtgtctgtgttgtgaagcttgagactctggaaa

SEQ ID NO: 436 - DNA, 5502 bp, Homo sapiens
cctgcccaccatctttgtccctggcaaagtgggttttgcgcagtggcttagacctagaaaagaatcgtgacgggcaggaaaccattacaccaccacctgggctgtgctctccggctcccgccgccacccccgccctcgccttcgcctccgcctccggtgcacattaaagatccaaagtcatgactgactccaagtatttcacaaccaataaaaaaggagaaatatttgaactaaaagctgaactcaacaatgaaaagaaagaaaagagaaaggaggctgtgaagaaagtgattgctgctatgaccgtggggaaggatgttagttctctctttccagacgtagtgaactgtatgcagactgacaatctggaactaaagaagcttgtgtatctctacttgatgaactacgccaagagtcagccagacatggccatcatggctgtaaacagctttgtgaaggactgtgaagatcctaatcctttgattcgagccttggcagtcagaaccatggggtgcatccgggtagacaaaattacagaatatctctgtgagccgctccgcaagtgcttgaaggatgaggatccctatgttcggaaaacagcagcagtctgcgtggcaaaactccatgatatcaatgcccaaatggtggaagatcagggatttctggattctctacgggatctcatagcagattcaaatccaatggtggtggctaatgccgtagcggcattatctgaaatcagtgagtctcacccaaacagcaacttacttgatctgaacccacagaacattaataagctgctgacagccctgaatgaatgcactgaatggggccagattttcatcctggactgcctgtctaattacaaccctaaagatgatcgggaggctcagagcatctgtgagcgggtaactccccggctatcccatgccaactcagcagtggtgctttcagcggtaaaagtcctaatgaagtttctagaattgttacctaaggattctgactactacaatatgctgctgaagaagttagcccctccacttgtcactttgctgtctggggagccagaagtgcagtatgtcgccctgaggaacatcaacttaattgtccagaaaaggcctgaaatcttgaagcaggaaatcaaagtcttctttgtgaagtacaatgatcccatctatgttaaactagagaagttggacatcatgattcgtttggcatctcaagccaacattgctcaggttctggcagaactgaaagaatatgctacagaggtggatgttgactttgttcgaaaagctgtgcgggccattggacggtgtgccatcaaggtggagcaatctgcagagcgctgtgtaagcacattgcttgatctaatccagaccaaagtgaattatgtggtccaagaagcaattgttgtcatcagggacatcttccgcaaataccccaacaagtatgaaagtatcatcgccactctgtgtgagaacttagactcgctggatgagccagatgctcgagcagctatgatttggattgtgggagaatatgctgaaagaattgacaatgcagatgagttactagaaagcttcctggagggttttcacgatgaaagcacccaggtgcagctcactctgcttactgccatagtgaagctgtttctcaagaaaccatcagaaacacaggagctagtccagcaggtcttgagtttggcaacacaggattctgataatcctgaccttcgagaccggggctatatttattggcgccttctctcaactgaccctgttacagctaaagaagtagtcttgtctgagaagccactgatctctgaggagacggaccttattgagccaactctgctggatgagctaatctgccacattggttctttggcctctgtgtatcataagcctcccaatgcttttgtggaaggaagtcatggaattcatcgtaaacacttgccaattcatcatgggagcactgatgcaggtgacagccctgttggcactaccactgcaacgaacctggaacagcctcaggttatcccctctcaaggtgatcttctaggggatcttttaaaccttgacctcggtcccccagtcaatgtgccacaggtgtcctccatgcagatgggagcagtggatctcctaggaggaggactagatagtctgcttggcagtgaccttggcgggggcattggaggaagtccggcagtgggacaatccttcatcccatcatcggtgcctgcaacctttgctccttcacctacacctgctgtggtcagcagtggactgaatgacctgtttgaactctccacagggataggcatggcacctggtggatatgtggctcctaaggctgtctggctacctgcagtaaaggctaaaggcttggagatttccggaacatttactcaccgccaagggcacatctatatggaaatgaacttcaccaataaagctctgcagcacatgacagattttgcaatccagtttaacaaaaatagctttggtgtcatccccagcactcctctggccatccatacaccactgatgccaaaccagagcattgatgtctccctgcctctcaataccttgggcccagtcatgaagatggaacctctgaataacctccaggtggctgtgaaaaacaatatcgatgtcttctacttcagctgcctcatcccactcaatgtgctttttgtagaagatggcaaaatggagcgccaggtcttccttgcaacatggaaggatattcccaatgaaaatgaacttcagtttcagattaaggaatgtcatttaaatgctgacactgtttccagcaagttgcaaaacaacaatgtttatactattgccaagaggaatgtggaagggcaggacatgctgtaccaatccctgaagctcactaatggcatttggattttggccgaactacgtatccagccaggaaaccccaattacacgctgtcactgaagtgtagagctcctgaagtctctcaatacatctatcaggtctacgacagcattttgaaaaactaacaagactggtccagtacccttcaaccatgctgtgatcggtgcaagtcaagaactcttaactggaagaaattgtattgctgcgtagaatctgaacacactgaggccacctagcaaggtagtaactagtctaacctgtgctaacattagggcacaacctgttggatagttttagcttcctgtgaacatttgtaaccactgcttcagtcacctcccacctcttgccacctgctgctgctatctgtccttacttgtgggcttctccatgctgtgccaatggctggctttttctacaccctcttttgagtgtagtttggtattttgtaattgagagctcatttcaaaagcagaaaaagacaacaaatattaaagcaaggaaaagtgtaactgaaacactgcactttactgttttatacttttgtacatatgagaaatcaagggattagtgcaaccagtagaaagcattgaaatgactgtcattaaccacacagtcctggaggcagagatgcagttacctaccctagcttttgatgggttctcttacctgtagtagccttatccctggtcatttggattttcagtttgcttttttctttttttcccctccaaactccttttccttggccaagccttcatgcttccccctttccatattataatctcatttgattgctctgcagttgggaacggtgatcttcttgaatgatgtttcagtgtgcaaaaactatagagcctgtcagcaccaaagctgacagaagttataccttactcctttcctttcccctgaacaaacctgctaatcccactaattcaggaatttgagtagagatggggaacaagaacccagatgctgtcccctcaccccctctcctgtatttctcaggtccagttcaaatctaaaattctacttttagagttgaaacagagtaataacttatctaaccctcttttcctacaaaggagaaagataaaaggcacaaaggttaccgccaaggcccgtcagctgtgtagtggcaaagccgagaccgagtctcctaagtccccgtcagtgtggttttcaccacaggactgtctcttgtcgttttcccctaatgccttctcctgccttttctgtgcctagtttttggctcttcacatattccatattgattttgacgctctgtatattggcatcaggtggcagctgaatatcttttgaattactcgaaggtaaagccagatgccagaatgaaggtgtagccagtgtttcccatatgcccctggagccccacttattgaggccagcagaataggtgcagagatgaagtgagcttagagatgttgcaaatgctctttatcccttcagctctctgatctgctctttcttcatgatacttagtctgcagggcatattaagatcatcccagaggttcaggcagttcctgtcatctctgaaaagactgggggatatgaaatcttccccctaccccacttaatgcgttggatatgatttttcaaagaatgcttcatgcccaaaataccagcctgtttagcagtgttacactgtttgatctgcgggcacttgttgcattgcctggcacccaatattcagggtccatgactaagactggtcttctcagatgccctgcttaaatcaggggcacttcaggctccacaggcgtcatgttggactgagacctaactcactggactcagaggaggaatcgtggaaaacaagagcaaaactaccccacacccctatttcatgtctgaaataaccctgtttcataccaaatctccaagagaaaaatatttggggaaggagggaggaaatatgtcccttgcacaccacccctgaagcacatggcagtaggaaacagcataggattgtatgtgggaggtggataggtcggtgatgtgtggagcggaaaagcaggttggtaaagttcccttcttgggacttattcctggagtcagtggatacaagtagtgcagaaggttcacactgcaaatagtgttctcatctcaaagcaaactatcattccagaaggaaaagtgtgtcagggcaagcagacaacacaatttcctatcagaatatgtccctcaacccccgaaacaaggcttctctcagcctccccaccagtgatggataacagctcctattctcagctgacctgactgagccaacccatgaactcttcactccttggggaagccacctcccatcacacccctgagcagagttagggaggaattctacttcccataaaaggacctctcctgagaggcaaaaccttggggaagtgggatggaggttgccctgcatcccccctcctctgcctgagtgtgtctttgtaatgtcagctggcatcatacaaagagcaggagaagcaaacacccagaactcttttgctggtcagagattccctgagtgtctgtcctcacccaagcctgctctgtgtctgtgttgtgaagcttgagactctggaaa

SEQ ID NO: 437 - DNA, 1957 bp, Homo sapiens
aagaacttctgcttgggtggctgaactctgatcttgacctagagtcatggccatggcaaccaaaggaggtactgtcaaagctgcttcaggattcaatgccatggaagatgcccagaccctgaggaaggccatgaaagggctcggcaccgatgaagacgccattattagcgtccttgcctaccgcaacaccgcccagcgccaggagatcaggacagcctacaagagcaccatcggcagggacttgatagacgacctgaagtcagaactgagtggcaacttcgagcaggtgattgtggggatgatgacgcccacggtgctgtatgacgtgcaagagctgcgaagggccatgaagggagccggcactgatgagggctgcctaattgagatcctggcctcccggacccctgaggagatccggcgcataagccaaacctaccagcagcaatatggacggagccttgaagatgacattcgctctgacacatcgttcatgttccagcgagtgctggtgtctctgtcagctggtgggagggatgaaggaaattatctggacgatgctctcgtgagacaggatgcccaggacctgtatgaggctggagagaagaaatgggggacagatgaggtgaaatttctaactgttctctgttcccggaaccgaaatcacctgttgcatgtgtttgatgaatacaaaaggatatcacagaaggatattgaacagagtattaaatctgaaacatctggtagctttgaagatgctctgctggctatagtaaagtgcatgaggaacaaatctgcatattttgctgaaaagctctataaatcgatgaagggcttgggcaccgatgataacaccctcatcagagtgatggtttctcgagcagaaattgacatgttggatatccgggcacacttcaagagactctatggaaagtctctgtactcgttcatcaagggtgacacatctggagactacaggaaagtactgcttgttctctgtggaggagatgattaaaataaaaatcccagaaggacaggaggattctcaacactttgaatttttttaacttcatttttctacactgctattatcattatctcagaatgcttatttccaattaaaacgcctacagctgcctcctagaatatagactgtctgtattattattcacctataattagtcattatgatgctttaaagctgtacttgcatttcaaagcttataagatataaatggagattttaaagtagaaataaatatgtattccatgtttttaaaagattactttctactttgtgtttcacagacattgaatatattaaattattccatattttcttttcagtgaaaaattttttaaatggaagactgttctaaaatcacttttttccctaatccaatttttagagtggctagtagtttcttcatttgaaattgtaagcatccggtcagtaagaatgcccatccagttttctatatttcatagtcaaagccttgaaagcatctacaaatctctttttttaggttttgtccatagcatcagttgatccttactaagtttttcatgggagacttccttcatcacatcttatgttgaaatcactttctgtagtcaaagtataccaaaaccaatttatctgaactaaattctaaagtatggttatacaaaccatatacatctggttaccaaacataaatgctgaacattccatattattatagttaatgtcttaatccagcttgcaagtgaatggaaaaaaaaataagcttcaaactaggtattctgggaatgatgtaatgctctgaatttagtatgatataaagaaaacttttttgtgctaaaaatactttttaaaatcaattttgttgattgtagtaatttctatttgcactgtgcctttcaactccagaaacattctgaagatgtacttggatttaattaaaaagttcactttgta

SEQ ID NO: 438 - DNA, 2207 bp, Homo sapiens
tgtggagcgcccgggaaacgggaccccaagaatccaactgctcccaccctgcggccgtcccggcccggggccccaggtgcgcttcccctagagagggattttccggtctcgtgggcagaggaacaaccaggaacttgggctcagtctccaccccacagtggggcggatccgtcccggataagacccgctgtctggccctgagtagggtgtgacctccgcagccgcagaggaggagcgcagcccggcctcgaagaacttctgcttgggtggctgaactctgatcttgacctagagtcatggccatggcaaccaaaggaggtactgtcaaagctgcttcaggattcaatgccatggaagatgcccagaccctgaggaaggccatgaaagggctcggcaccgatgaagacgccattattagcgtccttgcctaccgcaacaccgcccagcgccaggagatcaggacagcctacaagagcaccatcggcagggacttgatagacgacctgaagtcagaactgagtggcaacttcgagcaggtgattgtggggatgatgacgcccacggtgctgtatgacgtgcaagagctgcgaagggccatgaagggagccggcactgatgagggctgcctaattgagatcctggcctcccggacccctgaggagatccggcgcataagccaaacctaccagcagcaatatggacggagccttgaagatgacattcgctctgacacatcgttcatgttccagcgagtgctggtgtctctgtcagctggtgggagggatgaaggaaattatctggacgatgctctcgtgagacaggatgcccaggacctgtatgaggctggagagaagaaatgggggacagatgaggtgaaatttctaactgttctctgttcccggaaccgaaatcacctgttgcatgtgtttgatgaatacaaaaggatatcacagaaggatattgaacagagtattaaatctgaaacatctggtagctttgaagatgctctgctggctatagtaaagtgcatgaggaacaaatctgcatattttgctgaaaagctctataaatcgatgaagggcttgggcaccgatgataacaccctcatcagagtgatggtttctcgagcagaaattgacatgttggatatccgggcacacttcaagagactctatggaaagtctctgtactcgttcatcaagggtgacacatctggagactacaggaaagtactgcttgttctctgtggaggagatgattaaaataaaaatcccagaaggacaggaggattctcaacactttgaatttttttaacttcatttttctacactgctattatcattatctcagaatgcttatttccaattaaaacgcctacagctgcctcctagaatatagactgtctgtattattattcacctataattagtcattatgatgctttaaagctgtacttgcatttcaaagcttataagatataaatggagattttaaagtagaaataaatatgtattccatgtttttaaaagattactttctactttgtgtttcacagacattgaatatattaaattattccatattttcttttcagtgaaaaattttttaaatggaagactgttctaaaatcacttttttccctaatccaatttttagagtggctagtagtttcttcatttgaaattgtaagcatccggtcagtaagaatgcccatccagttttctatatttcatagtcaaagccttgaaagcatctacaaatctctttttttaggttttgtccatagcatcagttgatccttactaagtttttcatgggagacttccttcatcacatcttatgttgaaatcactttctgtagtcaaagtataccaaaaccaatttatctgaactaaattctaaagtatggttatacaaaccatatacatctggttaccaaacataaatgctgaacattccatattattatagttaatgtcttaatccagcttgcaagtgaatggaaaaaaaaataagcttcaaactaggtattctgggaatgatgtaatgctctgaatttagtatgatataaagaaaacttttttgtgctaaaaatactttttaaaatcaattttgttgattgtagtaatttctatttgcactgtgcctttcaactccagaaacattctgaagatgtacttggatttaattaaaaagttcactttgta

SEQ ID NO: 439 - DNA, 3161 bp, Homo sapiens
ggtcaggcgcgtgaccccgcgtgaccggggtgcgcgagccgagaggccctggaagcgggactctgggaccccattgaaagaaaggcaaccagaaaaggcgaaacgacaacctcgatagtgattggagctgatggaacgagggcggagctaaagtcccagaatactggccaatcagagtttaagattatcagggagcccgggaaggggaaaggggcgaaatggttctatggtcacatgccgcggggtctggtgggaggagcggttgcccagcggcctcttggcgcttcctgtttccggttcccagagtggggcacagcgaggcgctagggggaacgctggcctctgaaactagctctgggaccggggtctgcggccggcccctagctggccccgtctcccatccccagaagggtattcactggggattctgagctttggctactccagtttcccacgacacgatgttccctttctacagctgctggaggactggactgctactactactcctggctgtggcagtgagagaatcctggcagacagaagaaaaaacttgcgacttggtaggagaaaagggtaaagagtcagagaaagagttggctctagtgaagaggctgaaaccactgtttaataaaagctttgagagcactgtgggccagggttcagacacatacatctacatcttcagggtgtgccgggaagctggcaaccacacttctggggcaggcctggtgcaaatcaacaaaagtaatgggaaggagacagtggtagggagactcaacgagactcacatcttcaacggaagtaattggatcatgctgatctataaagggggtgatgaatatgacaaccactgtggcaaggagcagcgtcgtgcagtggtgatgatctcctgcaatcgacacaccctagcggacaattttaaccctgtgtctgaggagcgtggcaaagtccaagattgtttctacctctttgagatggatagcagcctggcctgttcaccagagatctcccacctcagtgtgggttccatcttacttgtcacgtttgcatcactggttgctgtttatgttgttggggggttcctataccagcgactggtagtgggagccaaaggaatggagcagtttccccacttagccttctggcaggatcttggcaacctggtagcagatggctgtgactttgtctgccgttctaaacctcgaaatgtgcctgcagcatatcgtggtgtgggggatgaccagctgggggaggagtcagaagaaagggatgaccatttattaccaatgtagattgcactttatatgtccagcctcttcctcagtcccccaaaccaaagctacacagccagatttctcaagcagtctcaactccagtccctcatctcacccttactattgctcttgctttccagtttgcttttgatttgcatcttctcactagtaaaactgccttccctttgttccttattttctgttttttctctagagaggtacagttgtaagtcagagttaatataatagggcctgtgaaaacagaggcttttgcattgtctcttgacatcagaagttacaataggcatatgggcaaaatggtgtagcaggctcactggccgtttgttttttaaacacattttcacaagtttttgagacactggatttctttaattaaaaaaaaaatgccaagaaacattatttatacagggttgattgctttcatgttgttattctgtaccctatagtagcctccatgagaatctggtatttcttgctgcttggaactactttgcagtgattacttggttgcagtccaagtactctcgtttagtctgagcctggagatgttctagacttgcttctcccacctctgagattaggacaggaaaaatgtgaaatttcccaattacaggattatacggtaccatcacatcatttgtggaaattggggtgactgtatagctgggattgggctaaggactgtggtcttatctgtccacatacagccaaaatgcctatccagaaatccagttcgttggaaaggaaaattggtactcctgtgccacaggggttccagaaaagggaagtcactttaccttgcggtggtgggatcctgatgtctttcatccatttgtagtaaaagctggtaaagcttttcttactcctggttccctaccagtatttctaaacatgtcgcactttctccacaggcatgtggttttgacctttttttcaatcttctagaaagggaacggaagcagaagtgggacatcgagggctctgctgtcctctgcgctgggtgtggaatgctgctgcacctgtcccttctgctggctcagggaagtgtcttcttgcccacatttctgtggggaaaggtttttaatcctctgatgcttccatcttcctgtttaggccatgtgcccagaaacctggactgatctttctttaatagtgaacccctgggccactgaagagtaacatggctccactggacacaaaagagggatggaatcaacaggcagggggccttttataagccttaggaaaagaaaatgaaactatttcatctttggacttttcaatactattggagtgattttttttctttctaaacagggaaaataatgttacaaaagcatcttttttgttatttgtttgcatccctcccccacaccctggtgttttaaaatgaagaaaaaaaaccatcactttttgtacaaaaactcttaatgattaaaaaacaaacaaaacatattggccttgtcatttgtgtgaaagtgggcaaagactggaatagagtaagacaactgaaaccaattttcatccttttactgaggaaaaaaatatttaatatttttgttatataaggaatagtgcctaaggcaggtacttatactcctgacctcagccccacacactctggttttataaagctataggacagagcagagatggaactgaaaaacagggtagaaaataacataaattggaggggaacagtgggatgcagaaagaatgacaacagccacattgaatggggctggatctgtgtgtaggtggctgagctaataagtgtctggctgggcgcaggtgtggctgtccgtgtcaggttcatgcccacattctgctggccactcccatctgcttctgccttcttggctg

SEQ ID NO: 440 - DNA, 2872 bp, Homo sapiens
ggttcccagagtggggcacagcgaggcgctagggggaacgctggcctctgaaactagctctgggaccggggtctgcggccggcccctagctggccccgtctcccatccccagaagggtattcactggggattctgagctttggctactccagtttcccacgacacgtgagtgatgttccctttctacagctgctggaggactggactgctactactactcctggctgtggcagtgagagaatcctggcagacagaagaaaaaacttgcgacttggtaggagaaaagggtaaagagtcagagaaagagttggctctagtgaagaggctgaaaccactgtttaataaaagctttgagagcactgtgggccagggttcagacacatacatctacatcttcagggtgtgccgggaagctggcaaccacacttctggggcaggcctggtgcaaatcaacaaaagtaatgggaaggagacagtggtagggagactcaacgagactcacatcttcaacggaagtaattggatcatgctgatctataaagggggtgatgaatatgacaaccactgtggcaaggagcagcgtcgtgcagtggtgatgatctcctgcaatcgacacaccctagcggacaattttaaccctgtgtctgaggagcgtggcaaagtccaagattgtttctacctctttgagatggatagcagcctggcctgttcaccagagatctcccacctcagtgtgggttccatcttacttgtcacgtttgcatcactggttgctgtttatgttgttggggggttcctataccagcgactggtagtgggagccaaaggaatggagcagtttccccacttagccttctggcaggatcttggcaacctggtagcagatggctgtgactttgtctgccgttctaaacctcgaaatgtgcctgcagcatatcgtggtgtgggggatgaccagctgggggaggagtcagaagaaagggatgaccatttattaccaatgtagattgcactttatatgtccagcctcttcctcagtcccccaaaccaaagctacacagccagatttctcaagcagtctcaactccagtccctcatctcacccttactattgctcttgctttccagtttgcttttgatttgcatcttctcactagtaaaactgccttccctttgttccttattttctgttttttctctagagaggtacagttgtaagtcagagttaatataatagggcctgtgaaaacagaggcttttgcattgtctcttgacatcagaagttacaataggcatatgggcaaaatggtgtagcaggctcactggccgtttgttttttaaacacattttcacaagtttttgagacactggatttctttaattaaaaaaaaaatgccaagaaacattatttatacagggttgattgctttcatgttgttattctgtaccctatagtagcctccatgagaatctggtatttcttgctgcttggaactactttgcagtgattacttggttgcagtccaagtactctcgtttagtctgagcctggagatgttctagacttgcttctcccacctctgagattaggacaggaaaaatgtgaaatttcccaattacaggattatacggtaccatcacatcatttgtggaaattggggtgactgtatagctgggattgggctaaggactgtggtcttatctgtccacatacagccaaaatgcctatccagaaatccagttcgttggaaaggaaaattggtactcctgtgccacaggggttccagaaaagggaagtcactttaccttgcggtggtgggatcctgatgtctttcatccatttgtagtaaaagctggtaaagcttttcttactcctggttccctaccagtatttctaaacatgtcgcactttctccacaggcatgtggttttgacctttttttcaatcttctagaaagggaacggaagcagaagtgggacatcgagggctctgctgtcctctgcgctgggtgtggaatgctgctgcacctgtcccttctgctggctcagggaagtgtcttcttgcccacatttctgtggggaaaggtttttaatcctctgatgcttccatcttcctgtttaggccatgtgcccagaaacctggactgatctttctttaatagtgaacccctgggccactgaagagtaacatggctccactggacacaaaagagggatggaatcaacaggcagggggccttttataagccttaggaaaagaaaatgaaactatttcatctttggacttttcaatactattggagtgattttttttctttctaaacagggaaaataatgttacaaaagcatcttttttgttatttgtttgcatccctcccccacaccctggtgttttaaaatgaagaaaaaaaaccatcactttttgtacaaaaactcttaatgattaaaaaacaaacaaaacatattggccttgtcatttgtgtgaaagtgggcaaagactggaatagagtaagacaactgaaaccaattttcatccttttactgaggaaaaaaatatttaatatttttgttatataaggaatagtgcctaaggcaggtacttatactcctgacctcagccccacacactctggttttataaagctataggacagagcagagatggaactgaaaaacagggtagaaaataacataaattggaggggaacagtgggatgcagaaagaatgacaacagccacattgaatggggctggatctgtgtgtaggtggctgagctaataagtgtctggctgggcgcaggtgtggctgtccgtgtcaggttcatgcccacattctgctggccactcccatctgcttctgccttcttggctg

SEQ ID NO: 441 - DNA, 3404 bp, Homo sapiens
ggtcaggcgcgtgaccccgcgtgaccggggtgcgcgagccgagaggccctggaagcgggactctgggaccccattgaaagaaaggcaaccagaaaaggcgaaacgacaacctcgatagtgattggagctgatggaacgagggcggagctaaagtcccagaatactggccaatcagagtttaagattatcagggagcccgggaaggggaaaggggcgaaatggttctatggtcacatgccgcggggtctggtgggaggagcggttgcccagcggcctcttggcgcttcctgtttccggttcccagagtggggcacagcgaggcgctagggggaacgctggcctctgaaactagctctgggaccggggtctgcggccggcccctagctggccccgtctcccatccccagaagggtattcactggggattctgagctttggctactccagtttcccacgacacgatgttccctttctacagctgctggaggactggactgctactactactcctggctgtggcagtgagagaatcctggcagacagaagaaaaaacttgcgacttggtaggagaaaagggtaaagagtcagagaaagagttggctctagtgaagaggctgaaaccactgtttaataaaagctttgagagcactgtgggccagggttcagacacatacatctacatcttcagggtgtgccgggaagctggcaaccacacttctggggcaggcctggtgcaaatcaacaaaagtaatgggaaggagacagtggtagggagactcaacgagactcacatcttcaacggaagtaattggatcatgctgatctataaagggggtgatgaatatgacaaccactgtggcaaggagcagcgtcgtgcagtggtgatgatctcctgcaatcgacacaccctagcggacaattttaaccctgtgtctgaggagcgtggcaaagtccaagattgtttctacctctttgagatggatagcagcctggcctgttcaccagagatctcccacctcagtgtgggttccatcttacttgtcacgtttgcatcactggttgctgtttatgttgttggggggttcctataccagcgactggtagtgggagccaaaggaatggagcagtttccccacttagccttctggcaggatcttggcaacctggtagcagatggctgtgactttgtctgccgttctaaacctcgaaatgtgcctgcagcatatcgtggtgtgggggatgaccagctgggggaggagtcagaagaaagggatgaccatttattaccaatgtagattgcactttatatgtccagcctcttcctcagtcccccaaaccaaagctacacagccagatttctcaagcagtctcaactccagtccctcatctcacccttactattgctcttgctttccagtttgcttttgatttgcatcttctcactagtaaaactgccttccctttgttccttattttctgttttttctctagagaggtacagttgtaagtcagagttaatataatagggcctgtgaaaacagaggcttttgcattgtctcttgacatcagaagttacaataggcatatgggcaaaatggtgtagcaggctcactggccgtttgttttttaaacacattttcacaagtttttgagacactggatttctttaattaaaaaaaaaatgccaagaaacattatttatacagggttgattgctttcatgttgttattctgtaccctatagtagcctccatgagaatctggtatttcttgctgcttggaactactttgcagtgattacttggttgcagtccaagtactctcgtttagtctgagcctggagatgttctagacttgcttctcccacctctgagattaggacaggaaaaatgtgaaatttcccaattacaggattatacggtaccatcacatcatttgtggaaattggggtgactgtatagctgggattgggctaaggactgtggtcttatctgtccacatacagccaaaatgcctatccagaaatccagttcgttggaaaggaaaattggtactcctgtgccacaggggttccagaaaagggaagtcactttaccttgcggtggtgggatcctgatgtctttcatccatttgtagtaaaagctggtaaagcttttcttactcctggttccctaccagtatttctaaacatgtcgcactttctccacaggcatgtggttttgacctttttttcaatcttctagaaagggaacggaagcagaagtgggacatcgagggctctgctgtcctctgcgctgggtgtggaatgctgctgcacctgtcccttctgctggctcagggaagtgtcttcttgcccacatttctgtggggaaaggtttttaatcctctgatgcttccatcttcctgtttaggccatgtgcccagaaacctggactgatctttctttaatagtgaacccctgggccactgaagagtaacatggctccactggacacaaaagagggatggaatcaacaggcagggggccttttataagccttaggaaaagaaaatgaaactatttcatctttggacttttcaatactattggagtgattttttttctttctaaacagggaaaataatgttacaaaagcatcttttttgttatttgtttgcatccctcccccacaccctggtgttttaaaatgaagaaaaaaaaccatcactttttgtacaaaaactcttaatgattaaaaaacaaacaaaacatattggccttgtcatttgtgtgaaagtgggcaaagactggaatagagtaagacaactgaaaccaattttcatccttttactgaggaaaaaaatatttaatatttttgttatataaggaatagtgcctaaggcaggtacttatactcctgacctcagccccacacactctggttttataaagctataggacagagcagagatggaactgaaaaacagggtagaaaataacataaattggaggggaacagtgggatgcagaaagaatgacaacagccacatgtgccccagtcaaatacttttagtccctgcagcagaagatgccaaccaagtctctatactggctggggatcctgccatggatgcaggagaaaaaattcaatcacaagggagtaagtgacaacaaaaagaaaaaactctgagccacagctacactgggaggggggaggaccagattttgctacttctgtcacacaagctagaaaaaccctacctctcccattgggcaggcaacctgacattccacccagttccttgccttaccatactatgtattcctcctcttggagaattaagacctgggctaaatgctccactccaggataaggctgagcagtcctagttctctagactgcctcttttataaagattggatt

SEQ ID NO: 442 - DNA, 1079 bp, Homo sapiens
ccagagtggggcacagcgaggcgctagggggaacgctggcctctgaaactagctctgggaccggggtctgcggccggcccctagctggccccgtctcccatccccagaagggtattcactggggattctgagctttggctactccagtttcccacgacacctgctggaggactggactgctactactactcctggctgtggcagtgagagaatcctggcagacagaagaaaaaacttgcgacttggtaggagaaaagggtaaagagtcagagaaagagttggctctagtgaagaggctgaaaccactgtttaataaaagctttgagagcactgtgggccagggttcagacacatacatctacatcttcagggtgtgccgggaagctggcaaccacacttctggggcaggcctggtgcaaatcaacaaaagtaatgggaaggagacagtggtagggagactcaacgagactcacatcttcaacggaagtaattggatcatgctgatctataaagggggtgatgaatatgacaaccactgtggcaaggagcagcgtcgtgcagtggtgatgatctcctgcaatcgacacaccctagcggacaattttaaccctgtgtctgaggagcgtggcaaagtccaagattgtttctacctctttgagatggatagcagcctggcctgttcaccagagatctcccacctcagtgtgggttccatcttacttgtcacgtttgcatcactggttgctgtttatgttgttggggggttcctataccagcgactggtagtgggagccaaaggaatggagcagtttccccacttagccttctggcaggatcttggcaacctggtagcagcatgtggttttgacctttttttcaatcttctagaaagggaacggaagcagaagtgggacatcgagggctctgctgtcctctgcgctgggtgtggaatgctgctgcacctgtcccttctgctggctcagggaagtgtcttcttgcccacatttctgtggggaaaggtttttaatcctctgatgcttccatcttcctgtttaggccatgtgcccagaaacctggac

SEQ ID NO: 443 - DNA, 3382 bp, Homo sapiens
atcggtgggtttatctcaaggcctgagtagccggtaacaaacgagggttcccgggattggaccgacgcagccatggtaggtccagatcccgtagaagggagcggggtcccataggttacggccgattcctggagcttctggactgagggccgcgcctctgcgacttgatatcaaaagaaagctaactgctagatctgatcgagttaagagtgtggatctgcatcctacagagccatggatgttggcaagtctttacaatggcagtgtgtgtgtttggaatcatgaaacacagacactggtgaagacatttgaagtatgtgatcttcctgttcgagctgcaaagtttgttgcaaggaagaattgggttgtgacaggagcggatgacatgcagattagagtgttcaattacaatactctggagagagttcatatgtttgaagcacactcagactacattcgctgtattgctgttcatccaacccagcctttcattctaactagcagtgatgacatgcttattaagctctgggactgggataaaaaatggtcttgctcacaagtgtttgaaggacacacccattatgttatgcagattgtgatcaaccccaaagataacaatcagtttgccagtgcctctttggacaggactatcaaggtgtggcagttgggctcttcgtcaccaaacttcactttggaaggacatgagaaaggcgtgaattgcattgattactacagtggtggggacaagccatacctcatttcaggtgcagatgaccgtcttgttaaaatatgggattatcagaataaaacatgtgtgcagacactggaaggacatgcccaaaatgtgtcttgtgccagctttcatcctgagttgccaatcattatcacaggttcagaagatggaacagtacgtatttggcattcaagcacctaccggcttgagagcacactgaattatggaatggagagggtatggtgcgtggccagtctaagagggtcaaacaatgtcgctttgggctatgatgaagggagcatcattgttaagcttggtcgggaggaacctgccatgtccatggatgccaatggaaagataatttgggccaagcattcagaagtccagcaggccaacctaaaagcaatgggagatgctgaaattaaagatggtgaaagattgccactggcagtaaaggatatgggcagttgtgaaatataccctcagactattcagcacaatcctaatgggcggtttgtggtggtgtgtggtgatggggagtatatcatctacacagcaatggcattgagaaacaagagctttggatctgctcaggagtttgcatgggcccacgattcttcagagtatgcaataagagagagcaacagcattgtaaagatatttaagaactttaaggaaaaaaaatcatttaaaccagattttggagcagaaagtatctacggcggcttcttattgggagtcagatctgtaaatggcttagccttctatgactgggacaatacagaactcatacgaagaattgaaattcagcccaaacatattttctggtctgactctggagagctagtctgtattgctactgaggaatcattttttatccttaagtatctgtcagaaaaagtcttggctgcacaggaaacacatgagggagttactgaagatggcattgaagatgcctttgaggttcttggtgagattcaggaaattgtgaaaacagggctttgggtaggcgattgcttcatttacacaagttctgtgaacagattaaattattatgttggaggagaaatagtcaccattgcccacttggacaggacgatgtatctcctaggctacattcctaaagacaacaggctttatctgggggataaagaattgaacatcattagctattccctgctggtttcagtcctggaataccagacagctgtcatgcggagggactttagcatggctgataaggtccttcctaccattccaaaagaacagaggaccagagttgcacactttttggaaaagcagggcttcaagcagcaagctcttacagtatccacagatcctgagcatcgttttgagcttgctcttcagcttggagagttaaaaattgcataccagttagcagtggaagcagagtcagaacagaagtggaaacaacttgctgaacttgccattagtaaatgtcagtttggcctagcccaggagtgcctgcatcatgcacaggattatgggggcctgctgcttttggccactgcctctggaaatgctaatatggtgaacaagctagcagagggtgcggagagagatggcaaaaataatgtggcattcatgagctactttttacagggcaaggttgatgcctgcctagagctcttaattagaactggacggctgccagaagctgccttcttggcccgaacttacttacccagtcaggtttcaagggtagtgaaactctggagagagaatctctcaaaagtcaatcagaaagcagcagaatcccttgctgacccaacagagtatgaaaacctgttccctggattaaaagaagcctttgttgttgaagaatgggtgaaggaaacacatgctgatctgtggccagccaaacaatacccacttgtcacgccaaatgaagagagaaatgtcatggaagagggaaaagactttcagccctcaagatctacagctcaacaggaacttgatgggaaacctgcttctcctactccggttattgtggcctcccacacagccaacaaagaagaaaagagtttactcgaactagaagtagatttggataatttggaattagaagatattgacacaacagatatcaatctggatgaagatattttggatgattgactgtaatgctttccatttacctgactaaacagatcattattatatataggtattgattgctaccctgaccacagtgctttggactatgagaaacttcttagatttttatatgtaaatgctgtggaccactgggagcacaatgcccacatcatcttaagaagagtttatgtgcagcatttaaatcactgtgttttccttgttaactaaaacagacatgggctttgatttttttcatactattagaccatatctcataaaaccttttgaattaatgaaggtacttgtttcctttctcaataatgaaaataggcttctagttttagaaggctgagccgaaactacaccttgcctagggatcagccccactgtcttttctttgtataactaaatctgcattttcaaatgttgtcaatcacatttttcttagagctgaatatccaggctgtaattctctaaaccctttttcttgacctcattgcatcattccacaggtcttgccccgattttgtc

SEQ ID NO: 444 - DNA, 3345 bp, Homo sapiens
ggctcccggaagttccacgtcagtcagtctgacggtcagtggatcggtgggtttatctcaaggcctgagtagccggtaacaaacgagggttcccgggattggaccgacgcagccatgcctctgcgacttgatatcaaaagaaagctaactgctagatctgatcgagttaagagtgtggatctgcatcctacagagccatggatgttggcaagtctttacaatggcagtgtgtgtgtttggaatcatgaaacacagacactggtgaagacatttgaagtatgtgatcttcctgttcgagctgcaaagtttgttgcaaggaagaattgggttgtgacaggagcggatgacatgcagattagagtgttcaattacaatactctggagagagttcatatgtttgaagcacactcagactacattcgctgtattgctgttcatccaacccagcctttcattctaactagcagtgatgacatgcttattaagctctgggactgggataaaaaatggtcttgctcacaagtgtttgaaggacacacccattatgttatgcagattgtgatcaaccccaaagataacaatcagtttgccagtgcctctttggacaggactatcaaggtgtggcagttgggctcttcgtcaccaaacttcactttggaaggacatgagaaaggcgtgaattgcattgattactacagtggtggggacaagccatacctcatttcaggtgcagatgaccgtcttgttaaaatatgggattatcagaataaaacatgtgtgcagacactggaaggacatgcccaaaatgtgtcttgtgccagctttcatcctgagttgccaatcattatcacaggttcagaagatggaacagtacgtatttggcattcaagcacctaccggcttgagagcacactgaattatggaatggagagggtatggtgcgtggccagtctaagagggtcaaacaatgtcgctttgggctatgatgaagggagcatcattgttaagcttggtcgggaggaacctgccatgtccatggatgccaatggaaagataatttgggccaagcattcagaagtccagcaggccaacctaaaagcaatgggagatgctgaaattaaagatggtgaaagattgccactggcagtaaaggatatgggcagttgtgaaatataccctcagactattcagcacaatcctaatgggcggtttgtggtggtgtgtggtgatggggagtatatcatctacacagcaatggcattgagaaacaagagctttggatctgctcaggagtttgcatgggcccacgattcttcagagtatgcaataagagagagcaacagcattgtaaagatatttaagaactttaaggaaaaaaaatcatttaaaccagattttggagcagaaagtatctacggcggcttcttattgggagtcagatctgtaaatggcttagccttctatgactgggacaatacagaactcatacgaagaattgaaattcagcccaaacatattttctggtctgactctggagagctagtctgtattgctactgaggaatcattttttatccttaagtatctgtcagaaaaagtcttggctgcacaggaaacacatgagggagttactgaagatggcattgaagatgcctttgaggttcttggtgagattcaggaaattgtgaaaacagggctttgggtaggcgattgcttcatttacacaagttctgtgaacagattaaattattatgttggaggagaaatagtcaccattgcccacttggacaggacgatgtatctcctaggctacattcctaaagacaacaggctttatctgggggataaagaattgaacatcattagctattccctgctggtttcagtcctggaataccagacagctgtcatgcggagggactttagcatggctgataaggtccttcctaccattccaaaagaacagaggaccagagttgcacactttttggaaaagcagggcttcaagcagcaagctcttacagtatccacagatcctgagcatcgttttgagcttgctcttcagcttggagagttaaaaattgcataccagttagcagtggaagcagagtcagaacagaagtggaaacaacttgctgaacttgccattagtaaatgtcagtttggcctagcccaggagtgcctgcatcatgcacaggattatgggggcctgctgcttttggccactgcctctggaaatgctaatatggtgaacaagctagcagagggtgcggagagagatggcaaaaataatgtggcattcatgagctactttttacagggcaaggttgatgcctgcctagagctcttaattagaactggacggctgccagaagctgccttcttggcccgaacttacttacccagtcaggtttcaagggtagtgaaactctggagagagaatctctcaaaagtcaatcagaaagcagcagaatcccttgctgacccaacagagtatgaaaacctgttccctggattaaaagaagcctttgttgttgaagaatgggtgaaggaaacacatgctgatctgtggccagccaaacaatacccacttgtcacgccaaatgaagagagaaatgtcatggaagagggaaaagactttcagccctcaagatctacagctcaacaggaacttgatgggaaacctgcttctcctactccggttattgtggcctcccacacagccaacaaagaagaaaagagtttactcgaactagaagtagatttggataatttggaattagaagatattgacacaacagatatcaatctggatgaagatattttggatgattgactgtaatgctttccatttacctgactaaacagatcattattatatataggtattgattgctaccctgaccacagtgctttggactatgagaaacttcttagatttttatatgtaaatgctgtggaccactgggagcacaatgcccacatcatcttaagaagagtttatgtgcagcatttaaatcactgtgttttccttgttaactaaaacagacatgggctttgatttttttcatactattagaccatatctcataaaaccttttgaattaatgaaggtacttgtttcctttctcaataatgaaaataggcttctagttttagaaggctgagccgaaactacaccttgcctagggatcagccccactgtcttttctttgtataactaaatctgcattttcaaatgttgtcaatcacatttttcttagagctgaatatccaggctgtaattctctaaaccctttttcttgacctcattgcatcattccacaggtcttgccccgattttgtc

SEQ ID NO: 445 - DNA, 2801 bp, Homo sapiens
cgggcgatctcgccatcttcgccgcttcctctcaggggccgccccgccatgaacattttccggctgactggggacctgtcccacctggcggccatcgtcatcctgctgctgaagatctggaagacgcgctcctgcgccggtatttctgggaaaagccagcttctgtttgcactggtcttcacaactcgttacctggatctttttacttcatttatttcattgtataacacatctatgaaggttatctaccttgcctgctcctatgccacagtgtacctgatctacctgaaatttaaggcaacctacgatggaaatcatgataccttccgagtggagtttctggtggtccctgtgggaggcctctcatttttagttaatcacgatttctctcctcttgagatcctctggaccttctccatctacctggagtccgtggctatccttccgcagctgtttatgatcagcaagactggggaggccgagaccatcaccacccactacctgttcttcctgggcctctatcgtgctttgtatcttgtcaactggatctggcgcttctactttgagggcttctttgacctcattgctgtggtggccggcgtagtccagaccatcctatactgtgacttcttctacttgtacattacaaaagtactcaagggaaagaagctcagtttgccagcataagtgccaaagaccatcaccagcatctgtccttcagggtgctcggacagaattcttaccacagcaaaggcataagatgcttgatacggaaaatcagaaacttaactcttttgttgcagatagtcatcagtggctctgtaaaaacgcagaggaaaagagccagaaggtttctgtttaatgcatcttgccttatctttttttattactgtgtacaaagatttttttacacaaagaaacttaatgctgtattaataaattcagtgtgtagcttcaattgggatagttccaaaagtgaagattttgtgaggaataagtgcaaattttttttttattttaaaaaattctttgaaactcttaagtctttgtgtctgcaatgaaattgtactccttgacagttgatagattatatattcttccatccctcaaacttgcattccactatatttattttttggcaaaagatgagctgtatttgtttgaaatctgagacactatgttcaattggatgtatctgttcaaatttattcccacgtgacgtggaagtccttcgttggatgtcacaacactacatttaaggttggtaaggatgacttggaggtccatggttttcattaccaacattttaagattctgaatgtcgatggagtctcactgaagagtcaccaaaggtgcctgccctcctcccctgctgggaagtgtcagttggagactgtcccaagggtgctgaagaatccagtggcaggggttctggctgctttccatctgagtgtgggatgggaggggtgttcatgatcatttggatatagcaatctactctgagaaatggaacacaaggagttacctatcactttcacttataattccaaaagatgactacaaccatgtccatgctcagattcaaacagttttccatatcacttttgggtggtaagatgatttacagttttttttttaattggcagcaccactaaccattccttacattcttttttgtatgtgtggttttctttttatttaacccgcagccgacatcgtagtttcttgttttgttttgttttacagagctgttgcatgacttatgttaccatcctaaaaaacactatattaaacatggaataaattgtctttttatgaattaggctttttgaacatcctgtgttgggatttttttgtttttcaattggcaacaaaagctctgtagggctgcagacatttaaagttcacataatcatctgtaagacattatgtattttgtggaaatactagaatttttttcctgattttgccattatatggatttgctattttttgattaatgcaaaagtatatgactttgttttttatgtgatacaccataaatattaaagtgttgaatactaacagtgctgactacaagaaggatgtagtattttggctttctgcattacaacgtcttctggaggaagggagcaggatgggtttcatttgtatctagtgtgtgtcttaacatctttctaaatcggcagtgtaactgcatagtttaacttcctgtctgtctccctcattttactcttccctccttgtcttatgttttggcttttgtgtatcagagcatctttctttgcagcatcctagtcttgcttcagtttctgtggtctcttttcatcctgcttgaagattcggagtgtggaaggaggctaggaagtctggtgcagtaggtgagcagacctcttgctgcccagcccagggtgggtggggcgcacacctgtctttgtgcatgcaaatctgatacacctggcgcatcctctggagagcacaacgcatggaaaggtctggaagctctgtgtagccattccttctgcagtcatcctacccaagtaaaagtaaccttggctatgttaccaccgttttggtcacccaggaggacatcttagcaagggtgcctgcgagggagtgtgggactgggcctcatcctcgccggcgttggaaaccaaggccttgtatgccacgccttatgaagcactgtttcacagttactttcacttcccgaataaaggttaccaggtaattaatatttttattgaggtgtttgtgtgtttttcaatgtaagcatcatgagaaataaagcaaagttcaga

SEQ ID NO: 446 - DNA, 2758 bp, Homo sapiens
ccgccatgaacattttccggctgactggggacctgtcccacctggcggccatcgtcatcctgctgctgaagatctggaagacgcgctcctgcgccggtatttctgggaaaagccagcttctgtttgcactggtcttcacaactcgttacctggatctttttacttcatttatttcattgtataacacatctatgaaggttatctaccttgcctgctcctatgccacagtgtacctgatctacctgaaatttaaggcaacctacgatggaaatcatgataccttccgagtggagtttctggtggtccctgtgggaggcctctcatttttagttaatcacgatttctctcctcttgagatcctctggaccttctccatctacctggagtccgtggctatccttccgcagctgtttatgatcagcaagactggggaggccgagaccatcaccacccactacctgttcttcctgggcctctatcgtgctttgtatcttgtcaactggatctggcgcttctactttgagggcttctttgacctcattgctgtggtggccggcgtagtccagaccatcctatactgtgacttcttctacttgtacattacaaaagtactcaagggaaagaagctcagtttgccagcataagtgccaaagaccatcaccagcatctgtccttcagggtgctcggacagaattcttaccacagcaaaggcataagatgcttgatacggaaaatcagaaacttaactcttttgttgcagatagtcatcagtggctctgtaaaaacgcagaggaaaagagccagaaggtttctgtttaatgcatcttgccttatctttttttattactgtgtacaaagatttttttacacaaagaaacttaatgctgtattaataaattcagtgtgtagcttcaattgggatagttccaaaagtgaagattttgtgaggaataagtgcaaattttttttttattttaaaaaattctttgaaactcttaagtctttgtgtctgcaatgaaattgtactccttgacagttgatagattatatattcttccatccctcaaacttgcattccactatatttattttttggcaaaagatgagctgtatttgtttgaaatctgagacactatgttcaattggatgtatctgttcaaatttattcccacgtgacgtggaagtccttcgttggatgtcacaacactacatttaaggttggtaaggatgacttggaggtccatggttttcattaccaacattttaagattctgaatgtcgatggagtctcactgaagagtcaccaaaggtgcctgccctcctcccctgctgggaagtgtcagttggagactgtcccaagggtgctgaagaatccagtggcaggggttctggctgctttccatctgagtgtgggatgggaggggtgttcatgatcatttggatatagcaatctactctgagaaatggaacacaaggagttacctatcactttcacttataattccaaaagatgactacaaccatgtccatgctcagattcaaacagttttccatatcacttttgggtggtaagatgatttacagttttttttttaattggcagcaccactaaccattccttacattcttttttgtatgtgtggttttctttttatttaacccgcagccgacatcgtagtttcttgttttgttttgttttacagagctgttgcatgacttatgttaccatcctaaaaaacactatattaaacatggaataaattgtctttttatgaattaggctttttgaacatcctgtgttgggatttttttgtttttcaattggcaacaaaagctctgtagggctgcagacatttaaagttcacataatcatctgtaagacattatgtattttgtggaaatactagaatttttttcctgattttgccattatatggatttgctattttttgattaatgcaaaagtatatgactttgttttttatgtgatacaccataaatattaaagtgttgaatactaacagtgctgactacaagaaggatgtagtattttggctttctgcattacaacgtcttctggaggaagggagcaggatgggtttcatttgtatctagtgtgtgtcttaacatctttctaaatcggcagtgtaactgcatagtttaacttcctgtctgtctccctcattttactcttccctccttgtcttatgttttggcttttgtgtatcagagcatctttctttgcagcatcctagtcttgcttcagtttctgtggtctcttttcatcctgcttgaagattcggagtgtggaaggaggctaggaagtctggtgcagtaggtgagcagacctcttgctgcccagcccagggtgggtggggcgcacacctgtctttgtgcatgcaaatctgatacacctggcgcatcctctggagagcacaacgcatggaaaggtctggaagctctgtgtagccattccttctgcagtcatcctacccaagtaaaagtaaccttggctatgttaccaccgttttggtcacccaggaggacatcttagcaagggtgcctgcgagggagtgtgggactgggcctcatcctcgccggcgttggaaaccaaggccttgtatgccacgccttatgaagcactgtttcacagttactttcacttcccgaataaaggttaccaggtaattaatatttttattgaggtgtttgtgtgtttttcaatgtaagcatcatgagaaataaagcaaagttcaga

SEQ ID NO: 447 - DNA, 2638 bp, Homo sapiens
cgggcgatctcgccatcttcgccgcttcctctcaggggccgccccgccatgaacattttccggctgactggggacctgtcccacctggcggccatcgtcatcctgctgctgaagatctggaagacgcgctcctgcgccggtatttctgggaaaagccagcttctgtttgcactggtcttcacaactcgttacctggatctttttacttcatttatttcattgtataacacatctatgaaggttatctaccttgcctgctcctatgccacagtgtacctgatctacctgaaatttaaggcaacctacgatggaaatcatgataccttccgagtggagtttctggtggtccctgtgggaggcctctcatttttagttaatcacgatttctctcctcttgagatcctctggaccttctccatctacctggagtccgtggctatccttccgcagctgtttatgatcagcaagactggggaggccgagaccatcaccacccactacctgttcttcctgggcctctatcgtgctttgtatcttgtcaactggatctggcgcttctactttgagggcttctttgacctcattgctgtggtggccggcgtagtccagaccatcctatactgtgacttcttctacttgtacattacaaaagtactcaagggaaagaagctcagtttgccagcataagtgccaaagaccatcaccagcatctgtccttcagggtgctcggacagaattcttaccacagcaaaggcataagatgcttgatacggaaaatcagaaacttaactcttttgttgcagatagtcatcagtggctctgtaaaaacgcagaggaaaagagccagaaggtttctgtttaatgcatcttgccttatctttttttattactgtgtacaaagatttttttacacaaagaaacttaatgctgtattaataaattcagtgtgtagcttcaattgggatagttccaaaagtgaagattttgtgaggaataagtgcaaattttttttttattttaaaaaattctttgaaactcttaagtctttgtgtctgcaatgaaattgtactccttgacagttgatagattatatattcttccatccctcaaacttgcattccactatatttattttttggtatctgttcaaatttattcccacgtgacgtggaagtccttcgttggatgtcacaacactacatttaaggttggtaaggatgacttggaggtccatggttttcattaccaacattttaagattctgaatgtcgatggagtctcactgaagagtcaccaaaggtgcctgccctcctcccctgctgggaagtgtcagttggagactgtcccaagggtgctgaagaatccagtggcaggggttctggctgctttccatctgagtgtgggatgggaggggtgttcatgatcatttggatatagcaatctactctgagaaatggaacacaaggagttacctatcactttcacttataattccaaaagatgactacaaccatgtccatgctcagattcaaacagttttccatatcacttttgggtggtaagatgatttacagttttttttttaattggcagcaccactaaccattccttacattcttttttgtatgtgtggttttctttttatttaacccgcagccgacatcgtagtttcttgttttgttttgttttacagagctgttgcatgacttatgttaccatcctaaaaaacactatattaaacatggaataaattgtctttttatgaattaggctttttgaacatcctgtgttgggatttttttgtttttcaattggcaacaaaagctctgtagggctgcagacatttaaagttcacataatcatctgtaagacattatgtattttgtggaaatactagaatttttttcctgattttgccattatatggatttgctattttttgattaatgcaaaatactaacagtgctgactacaagaaggatgtagtattttggctttctgcattacaacgtcttctggaggaagggagcaggatgggtttcatttgtatctagtgtgtgtcttaacatctttctaaatcggcagtgtaactgcatagtttaacttcctgtctgtctccctcattttactcttccctccttgtcttatgttttggcttttgtgtatcagagcatctttctttgcagcatcctagtcttgcttcagtttctgtggtctcttttcatcctgcttgaagattcggagtgtggaaggaggctaggaagtctggtgcagtaggtgagcagacctcttgctgcccagcccagggtgggtggggcgcacacctgtctttgtgcatgcaaatctgatacacctggcgcatcctctggagagcacaacgcatggaaaggtctggaagctctgtgtagccattccttctgcagtcatcctacccaagtaaaagtaaccttggctatgttaccaccgttttggtcacccaggaggacatcttagcaagggtgcctgcgagggagtgtgggactgggcctcatcctcgccggcgttggaaaccaaggccttgtatgccacgccttatgaagcactgtttcacagttactttcacttcccgaataaaggttaccaggtaattaatattttt

SEQ ID NO: 448 - DNA, 2905 bp, Homo sapiens
cgcgcgcgcgcgcgccggcagttcggccacgtccctggccacgtcgcgggcgatctcgccatcttcgccgcttcctctcaggggccgccgcctcctgagccgcccagccccggggccgccgcgctgcgccgaccgccaccgccgccgccgccatgaacattttccggctgactggggacctgtcccacctggcggccatcgtcatcctgctgctgaagatctggaagacgcgctcctgcgccggtatttctgggaaaagccagcttctgtttgcactggtcttcacaactcgttacctggatctttttacttcatttatttcattgtataacacatctatgaaggttatctaccttgcctgctcctatgccacagtgtacctgatctacctgaaatttaaggcaacctacgatggaaatcatgataccttccgagtggagtttctggtggtccctgtgggaggcctctcatttttagttaatcacgatttctctcctcttgagatcctctggaccttctccatctacctggagtccgtggctatccttccgcagctgtttatgatcagcaagactggggaggccgagaccatcaccacccactacctgttcttcctgggcctctatcgtgctttgtatcttgtcaactggatctggcgcttctactttgagggcttctttgacctcattgctgtggtggccggcgtagtccagaccatcctatactgtgacttcttctacttgtacattacaaaagtactcaagggaaagaagctcagtttgccagcataagtgccaaagaccatcaccagcatctgtccttcagggtgctcggacagaattcttaccacagcaaaggcataagatgcttgatacggaaaatcagaaacttaactcttttgttgcagatagtcatcagtggctctgtaaaaacgcagaggaaaagagccagaaggtttctgtttaatgcatcttgccttatctttttttattactgtgtacaaagatttttttacacaaagaaacttaatgctgtattaataaattcagtgtgtagcttcaattgggatagttccaaaagtgaagattttgtgaggaataagtgcaaattttttttttattttaaaaaattctttgaaactcttaagtctttgtgtctgcaatgaaattgtactccttgacagttgatagattatatattcttccatccctcaaacttgcattccactatatttattttttggcaaaagatgagctgtatttgtttgaaatctgagacactatgttcaattggatgtatctgttcaaatttattcccacgtgacgtggaagtccttcgttggatgtcacaacactacatttaaggttggtaaggatgacttggaggtccatggttttcattaccaacattttaagattctgaatgtcgatggagtctcactgaagagtcaccaaaggtgcctgccctcctcccctgctgggaagtgtcagttggagactgtcccaagggtgctgaagaatccagtggcaggggttctggctgctttccatctgagtgtgggatgggaggggtgttcatgatcatttggatatagcaatctactctgagaaatggaacacaaggagttacctatcactttcacttataattccaaaagatgactacaaccatgtccatgctcagattcaaacagttttccatatcacttttgggtggtaagatgatttacagttttttttttaattggcagcaccactaaccattccttacattcttttttgtatgtgtggttttctttttatttaacccgcagccgacatcgtagtttcttgttttgttttgttttacagagctgttgcatgacttatgttaccatcctaaaaaacactatattaaacatggaataaattgtctttttatgaattaggctttttgaacatcctgtgttgggatttttttgtttttcaattggcaacaaaagctctgtagggctgcagacatttaaagttcacataatcatctgtaagacattatgtattttgtggaaatactagaatttttttcctgattttgccattatatggatttgctattttttgattaatgcaaaagtatatgactttgttttttatgtgatacaccataaatattaaagtgttgaatactaacagtgctgactacaagaaggatgtagtattttggctttctgcattacaacgtcttctggaggaagggagcaggatgggtttcatttgtatctagtgtgtgtcttaacatctttctaaatcggcagtgtaactgcatagtttaacttcctgtctgtctccctcattttactcttccctccttgtcttatgttttggcttttgtgtatcagagcatctttctttgcagcatcctagtcttgcttcagtttctgtggtctcttttcatcctgcttgaagattcggagtgtggaaggaggctaggaagtctggtgcagtaggtgagcagacctcttgctgcccagcccagggtgggtggggcgcacacctgtctttgtgcatgcaaatctgatacacctggcgcatcctctggagagcacaacgcatggaaaggtctggaagctctgtgtagccattccttctgcagtcatcctacccaagtaaaagtaaccttggctatgttaccaccgttttggtcacccaggaggacatcttagcaagggtgcctgcgagggagtgtgggactgggcctcatcctcgccggcgttggaaaccaaggccttgtatgccacgccttatgaagcactgtttcacagttactttcacttcccgaataaaggttaccaggtaattaatatttttattgaggtgtttgtgtgtttttcaatgtaagcatcatgagaaataaagcaaagttcaga

SEQ ID NO: 449 - DNA, 1563 bp, Homo sapiens
tcctccccctctcgctctcctccctcttcccggctccagctccgccgccagctccagcctttgctccccctcccaaagtcccctccccggagcggagcgcacctagggtccctcttccgtccccccagcccagctacccgttcagaccagcagcctcggggggcacccccccgccagcctgcctccctcccgctcagccctgccagggttccccagccatgaatctcttccgattcctgggagacctctcccacctcctcgccatcatcttgctactgctcaaaatctggaagtcccgctcgtgcgccggaatttcagggaagagccaggtcctgtttgctgtggtgttcactgcccgatatctggacctcttcaccaactacatctcactctacaacacgtgtatgaaggtggtctacatagcctgctccttcaccacggtctggttgatttatagcaagttcaaagctacttacgatgggaaccatgacacgttcagagtggagttcctggtcgttcccacagccattctggcgttcctggtcaatcatgacttcacccctctggagatcctctggaccttctccatctacctggagtcagtggccatcttgccgcagctgttcatggtgagcaagaccggcgaggcggagaccatcaccagccactacttgtttgcgctaggcgtttaccgcacgctctatctcttcaactggatctggcgctaccatttcgagggcttcttcgacctcatcgccattgtggcaggcctggtccagacagtcctctactgcgatttcttctacctctatatcaccaaagtcctaaaggggaagaagttgagtttgccggcatagccccggtcctctccatctctctcctcggcagcagcgggaggcagaggaaggcggcagaagatgaagagctttcccatccaggggtgacttttttaagaacccacctcttgtgctccccatcccgcctcctgccgggtttcagggggacagtggaggatccaggtcttggggagctcaggacttgggctgtttgtagttttttgccttttagacaagaaaaaaaaatctttccactctttagtttttgattctgatgactcgtttttcttctactctgtggccccaatttttataaagtgtttttgagtgtcctatgggccggggcagggtccaagatcttttcccttccccaggcccctcggctccctcccagatcccacccccagccccactggttgccaaacactaaatctgccgacacccatctgccccacctcctgccatggccatgaaccgcgacccccactaaatttctagattggggatagggagaaagggaggcccaggaaggtctcccctgattttttttcatagtaatttttttccccagagtttgaattttttggtcttctcctggttttttggcaaattaggggggcccggggctcaagtgcgggaagggggctggcccgaggatcccatggctctcacaccatgtttttgtacagaactgatggttgaatctttgttctcttgaaataaacag

SEQ ID NO: 450 - DNA, 1630 bp, Homo sapiens
tcctccccctctcgctctcctccctcttcccggctccagctccgccgccagctccagcctttgctccccctcccaaagtcccctccccggagcggagcgcacctagggtccctcttccgtccccccagcccagctacccgttcagaccagcagcctcggggggcacccccccgccagcctgcctccctcccgctcagccctgccagggttccccagccatgaatctcttccgattcctgggagacctctcccacctcctcgccatcatcttgctactgctcaaaatctggaagtcccgctcgtgcgccggaatttcagggaagagccaggtcctgtttgctgtggtgttcactgcccgatatctggacctcttcaccaactacatctcactctacaacacgtgtatgaaggtggtctacatagcctgctccttcaccacggtctggttgatttatagcaagttcaaagctacttacgatgggaaccatgacacgttcagagtggagttcctggtcgttcccacagccattctggcgttcctggtcaatcatgacttcacccctctggaggaagataggcctgggtggccagatgtgctgatcttttcaacagaagccataattcaggagttttcagatcctctggaccttctccatctacctggagtcagtggccatcttgccgcagctgttcatggtgagcaagaccggcgaggcggagaccatcaccagccactacttgtttgcgctaggcgtttaccgcacgctctatctcttcaactggatctggcgctaccatttcgagggcttcttcgacctcatcgccattgtggcaggcctggtccagacagtcctctactgcgatttcttctacctctatatcaccaaagtcctaaaggggaagaagttgagtttgccggcatagccccggtcctctccatctctctcctcggcagcagcgggaggcagaggaaggcggcagaagatgaagagctttcccatccaggggtgacttttttaagaacccacctcttgtgctccccatcccgcctcctgccgggtttcagggggacagtggaggatccaggtcttggggagctcaggacttgggctgtttgtagttttttgccttttagacaagaaaaaaaaatctttccactctttagtttttgattctgatgactcgtttttcttctactctgtggccccaatttttataaagtgtttttgagtgtcctatgggccggggcagggtccaagatcttttcccttccccaggcccctcggctccctcccagatcccacccccagccccactggttgccaaacactaaatctgccgacacccatctgccccacctcctgccatggccatgaaccgcgacccccactaaatttctagattggggatagggagaaagggaggcccaggaaggtctcccctgattttttttcatagtaatttttttccccagagtttgaattttttggtcttctcctggttttttggcaaattaggggggcccggggctcaagtgcgggaagggggctggcccgaggatcccatggctctcacaccatgtttttgtacagaactgatggttgaatctttgttctcttgaaataaacag

SEQ ID NO: 451 - DNA, 1624 bp, Homo sapiens
tcctccccctctcgctctcctccctcttcccggctccagctccgccgccagctccagcctttgctccccctcccaaagtcccctccccggagcggagcgcacctagggtccctcttccgtccccccagcccagctacccgttcagaccagcagcctcggggggcacccccccgccagcctgcctccctcccgctcagccctgccagggttccccagccatgaatctcttccgattcctgggagacctctcccacctcctcgccatcatcttgctactgctcaaaatctggaagtcccgctcgtgcgccggaatttcagggaagagccaggtcctgtttgctgtggtgttcactgcccgatatctggacctcttcaccaactacatctcactctacaacacgtgtatgaaggtggtctacatagcctgctccttcaccacggtctggttgatttatagcaagttcaaagctacttacgatgggaaccatgacacgttcagagtggagttcctggtcgttcccacagccattctggcgttcctggtcaatcatgacttcacccctctggagcatcaactaacctggcttcacgagagcctccctggaggattctggatgattctgggagcagatcctctggaccttctccatctacctggagtcagtggccatcttgccgcagctgttcatggtgagcaagaccggcgaggcggagaccatcaccagccactacttgtttgcgctaggcgtttaccgcacgctctatctcttcaactggatctggcgctaccatttcgagggcttcttcgacctcatcgccattgtggcaggcctggtccagacagtcctctactgcgatttcttctacctctatatcaccaaagtcctaaaggggaagaagttgagtttgccggcatagccccggtcctctccatctctctcctcggcagcagcgggaggcagaggaaggcggcagaagatgaagagctttcccatccaggggtgacttttttaagaacccacctcttgtgctccccatcccgcctcctgccgggtttcagggggacagtggaggatccaggtcttggggagctcaggacttgggctgtttgtagttttttgccttttagacaagaaaaaaaaatctttccactctttagtttttgattctgatgactcgtttttcttctactctgtggccccaatttttataaagtgtttttgagtgtcctatgggccggggcagggtccaagatcttttcccttccccaggcccctcggctccctcccagatcccacccccagccccactggttgccaaacactaaatctgccgacacccatctgccccacctcctgccatggccatgaaccgcgacccccactaaatttctagattggggatagggagaaagggaggcccaggaaggtctcccctgattttttttcatagtaatttttttccccagagtttgaattttttggtcttctcctggttttttggcaaattaggggggcccggggctcaagtgcgggaagggggctggcccgaggatcccatggctctcacaccatgtttttgtacagaactgatggttgaatctttgttctcttgaaataaacag

SEQ ID NO: 452 - DNA, 1163 bp, Homo sapiens
cggctccagctccgccgccagctccagcctttgctccccctcccaaagtcccctccccggagcggagcgcacctagggtccctcttccgtccccccagcccagctacccgttcagaccagcagcctcggggggcacccccccgccagcctgcctccctcccgctcagccctgccagggttccccagccatgaatctcttccgattcctgggagacctctcccacctcctcgccatcatcttgctactgctcaaaatctggaagtcccgctcgtgcgccggaatttcagggaagagccaggtcctgtttgctgtggtgttcactgcccgatatctggacctcttcaccaactacatctcactctacaacacgtgtatgaaggtggtctacatagcctgctccttcaccacggtctggttgatttatagcaagttcaaagctacttacgatgggaaccatgacacgttcagagtggagttcctggtcgttcccacagccattctggcgttcctggtcaatcatgacttcacccctctggagatcctctggaccttctccatctacctggagtcagtggccatcttgccgcagctgttcatggtgagcaagaccggcgaggcggagaccatcaccagccactactttttgtagttttttgccttttagacaagaaaaaaaaatctttccactctttagtttttgattctgatgactcgtttttcttctactctgtggccccaatttttataaagtgtttttgagtgtcctatgggccggggcagggtccaagatcttttcccttccccaggcccctcggctccctcccagatcccacccccagccccactggttgccaaacactaaatctgccgacacccatctgccccacctcctgccatggccatgaaccgcgacccccactaaatttctagattggggatagggagaaagggaggcccaggaaggtctcccctgattttttttcatagtaatttttttccccagagtttgaattttttggtcttctcctggttttttggcaaattaggggggcccggggctcaagtgcgggaagggggctggcccgaggatcccatggctctcacaccatgtttttgtacagaactgatggttgaatctttgttctcttgaaataaacagaag

SEQ ID NO: 453 - DNA, 4348 bp, Homo sapiens
cgagcccggcccgcgaacgtcacgtccctgcgcgctccctgcactctcccgagctgcgctaggcgggcgccacggctgcccggcgaaggaaaccgaaaccgagtccgggcccgtccctccgcggccccatccgcccggtgcacccggggccgcgctcgccaggccgcggagcccagagctgcgcgcacgaaccgtgcgccgggagggcgtgggcgtggcgccgaagggtcccgggtcttcgacgcctctgcggcggctcctccctccttgcagttggatccctggcgggtgcggcccggcccggcccgtgagcggcgcacagaatgggccgatgctgcttctacacggcggggacgttgtccctgctcctgctggtgaccagcgtcacgctgctggtggcccgggtcttccagaaggctgtagaccagagtatcgagaagaaaattgtgttaaggaatggtactgaggcatttgactcctgggagaagccccctctgcctgtgtatactcagttctatttcttcaatgtcaccaatccagaggagatcctcagaggggagacccctcgggtggaagaagtggggccatacacctacagggaactcagaaacaaagcaaatattcaatttggagataatggaacaacaatatctgctgttagcaacaaggcctatgtttttgaacgagaccaatctgttggagaccctaaaattgacttaattagaacattaaatattcctgtattgactgtcatagagtggtcccaggtgcacttcctcagggagatcatcgaggccatgttgaaagcctatcagcagaagctctttgtgactcacacagttgacgaattgctctggggctacaaagatgaaatcttgtcccttatccatgttttcaggcccgatatctctccctattttggcctattctatgagaaaaatgggactaatgatggagactatgtttttctaactggagaagacagttaccttaactttacaaaaattgtggaatggaatgggaaaacgtcacttgactggtggataacagacaagtgcaatatgattaatggaacagatggagattcttttcacccactaataaccaaagatgaggtcctttatgtcttcccatctgacttttgcaggtcagtgtatattactttcagtgactatgagagtgtacagggactgcctgcctttcggtataaagttcctgcagaaatattagccaatacgtcagacaatgccggcttctgtatacctgagggaaactgcctgggctcaggagttctgaatgtcagcatctgcaagaatggtgcacccatcattatgtctttcccacacttttaccaagcagatgagaggtttgtttctgccatagaaggcatgcacccaaatcaggaagaccatgagacatttgtggacattaatcctttgactggaataatcctaaaagcagccaagaggttccaaatcaacatttatgtcaaaaaattagatgactttgttgaaacgggagacattagaaccatggttttcccagtgatgtacctcaatgagagtgttcacattgataaagagacggcgagtcgactgaagtctatgattaacactactttgatcatcaccaacataccctacatcatcatggcgctgggtgtgttctttggtttggtttttacctggcttgcatgcaaaggacagggatccatggatgagggaacagcggatgaaagagcacccctcattcgaacctaaacattgcctttgcttggtgaagaaactgtgtgagctgtcctgacctggacgatgacgtggggaaaccctccacctccttgcaggcttgttgcctgttgaaagaaggaaaaagacacggcgctggcaagtgataggaacattctggccagaggttaaagagcaggctgacatggctggccattaagctttataaaatcatgtgggctctgaaattgttcttttatgtgtctagcaagtatttaataaacccttgtatagtaattttgttgttgttgggtgctggtagctccagaattttgtgaccactattgtgggtaaaatgtctctgcatcacttgttaatgctactggtctaacttcattcagtatgcttcattcaccgaactttgtgctcaaaatgcgtatataccattttatgttgtattcctccatttcacttgcaaaacagaagtaaataagagttcgggacccagggtaaaatggtagcttcatccaatatatcattcaaatgcatctgattttcagtcttccaactgcaataaaatactgggtagaatcaaatgggaaaggggttgggtggggcaatacccatgagttgatagtgataagctcctaaggatttttaacttgtacttttgtgaacgaagagaatgcataaataatgttggtgaggataaagtacagatatttcatgtagaattaattgctagttatgatgcttgtggatagttaactgttttttttttagtcaaaatgatcatgctacgaaaagatgcttctgagagaatgtaatgagtaactgatttttcttcctgagtcgcccttgccaaatatgttactgtattaattaatctaatattgagtgattatttgtaaaattatgaatatgggaaatccatctatctacagcctaagttacacataagtttcagaaagtctgattagactaaagagatatttcttctgggacagccttcttcttggtaattttgaagttctttttacaagttccttcctcagtttcagttctttccagtgttttgtagctcactgtcactcactgaatagagaaacgtgtgccctatacttcctgtgacaatcattttgctgacagaatgatggatgtttaaaatattgcacaaagtactttaaagaaaggtctgttaggaccagaagcagagacaccacttttcaaaggacttcttggtttcagcataacctaagacagggaattgggagccatcatatgtcacagtgttcagaattcaagcatatttaagggcattttctttgattctcaaagttcagcattcattttgaattgagaagcctatacatttagctgacaaagtgcttatagaatttcttaacaactgaaccattcaaaaggattttttttgtttaaaactggatttcaatgtaagcaaatgaagaaaaaaatatagatttcatttccatagcttcttatccctgtattgaggtaataaattgttttactgacaatttttcctttttctacactaaaacaatatgtgatatatttcccctcttgaagaggcaattcattaaactctcaaattttctatagaatcaagatagaacctttagatactccaactcaccaaaatgtaaaaaaactaacaaaaatatttggtcttcaataatgctaaatatctacatttttagaatttatcaacatttaactagataattgggcatgtcttaattatgcatgtacttatccatactaataaaattgacaatgctagtgcatacttattggtttagtcctattatcaggatataatcatctgtgaggaggatattttaaatactgtaaatgataacagttaatgatatacacatttagactgagttgcacactggcagggagaccaaaaacattacttccatacttgtgtcatgattcttttttttttgagagagtctcactctgtcgccaggctggagtacagtggcatgatctcggctcactgcaacctctgcctcccgggttcaagcaattctcctgcctcagccacccaagtagctgggactacaggtgcgtgccaccacgcccagctaaattttgtatttttagtggagacggggtttcaccatgttggccaggatggtctcaatctcctgaccctgcgatctgcccacctcagcctcccaaagtgctgggattacaggcgtaagccaccgggcctggcctgttttatgattcttaatagttacttggtttaaatcacatttgatactatccttctgaaaagtctgagacagatctacaaactacagtcaaaattatagattaagaggaatgaatgcacctatttggctttaagttgaagatgaattatttctcatgctcattttcttgcggcagttatcttagaaagacccccaaaggctttgtgattgtaagcactgtcatgatcacagaatgcaagcttctggtaccatgatcctcaacttagagaggaagaaaccaagacagagagcttaactcacttctctcagggaaagcttttctaaccagacttgatttcctcatgttctagaaagatcactaatggtcaagtg

SEQ ID NO: 454 - DNA, 4403 bp, Homo sapiens
cgagcccggcccgcgaacgtcacgtccctgcgcgctccctgcactctcccgagctgcgctaggcgggcgccacggctgcccggcgaaggaaaccgaaaccgagtccgggcccgtccctccgcggccccatccgcccggtgcacccggggccgcgctcgccaggccgcggagcccagagctgcgcgcacgaaccgtgcgccgggagggcgtgggcgtggcgccgaagggtcccgggtcttcgacgcctctgcggcggctcctccctccttgcagttggatccctggcgggtgcggcccggcccggcccgtgagcggcgcacagaatgggccgatgctgcttctacacggcggggacgttgtccctgctcctgctggtgaccagcgtcacgctgctggtggcccgggtcttccagaaggctgtagaccagagtatcgagaagaaaattgtgttaaggaatggtactgaggcatttgactcctgggagaagccccctctgcctgtgtatactcagttctatttcttcaatgtcaccaatccagaggagatcctcagaggggagacccctcgggtggaagaagtggggccatacacctacagggaactcagaaacaaagcaaatattcaatttggagataatggaacaacaatatctgctgttagcaacaaggcctatgtttttgaacgagaccaatctgttggagaccctaaaattgacttaattagaacattaaatattcctgtattgactgtcatagagtggtcccaggtgcacttcctcagggagatcatcgaggccatgttgaaagcctatcagcagaagctctttgtgactcacacagttgacgaattgctctggggctacaaagatgaaatcttgtcccttatccatgttttcaggcccgatatctctccctattttggcctattctatgagaaaaatgggactaatgatggagactatgtttttctaactggagaagacagttaccttaactttacaaaaattgtggaatggaatgggaaaacgtcacttgactggtggataacagacaagtgcaatatgattaatggaacagatggagattcttttcacccactaataaccaaagatgaggtcctttatgtcttcccatctgacttttgcaggtcagtgtatattactttcagtgactatgagagtgtacagggactgcctgcctttcggtataaagttcctgcagaaatattagccaatacgtcagacaatgccggcttctgtatacctgagggaaactgcctgggctcaggagttctgaatgtcagcatctgcaagaatggtgcacccatcattatgtctttcccacacttttaccaagcagatgagaggtttgtttctgccatagaaggcatgcacccaaatcaggaagaccatgagacatttgtggacattaatcctttgactggaataatcctaaaagcagccaagaggttccaaatcaacatttatgtcaaaaaattagatgactttgttgaaacgggagacattagaaccatggttttcccagtgatgtacctcaatgagagtgttcacattgataaagagacggcgagtcgactgaagtctatgattaacactactttgatcatcaccaacataccctacatcatcatggcgctgggtgtgttctttggtttggtttttacctggcttgcatgcaaaggacagggatccatggatgagggaacagcggatgaaagagcacccctcattcgaacctaaacattgcctttgcttggtgaagaaactgtgtgagctgtcctgacctggacgatgacgtggggaaaccctccacctccttgcaggcttgttgcctgttgaaagaaggaaaaagacacggcgctggcaagtgataggaacattctggccagaggttaaagagcaggctgacatggctggccattaagctttataaaatcatgtgggctctgaaattgttcttttatgtgtctagcaagtatttaataaacccttgtatagtaattttgttgttgttgggtgctggtagctccagaattttgtgaccactattgtgggtaaaatgtctctgcatcacttgttaatgctactggtctaacttcattcagtatgcttcattcaccgaactttgtgctcaaaatgcgtatataccattttatgttgtattcctccatttcacttgcaaaacagaagtaaataagagttcgggacccagggtaaaatggtagcttcatccaatatatcattcaaatgcatctgatttctaaaacatattacattttatgctgatcttcagttcataattcttccaggaaaactcagtcttccaactgcaataaaatactgggtagaatcaaatgggaaaggggttgggtggggcaatacccatgagttgatagtgataagctcctaaggatttttaacttgtacttttgtgaacgaagagaatgcataaataatgttggtgaggataaagtacagatatttcatgtagaattaattgctagttatgatgcttgtggatagttaactgttttttttttagtcaaaatgatcatgctacgaaaagatgcttctgagagaatgtaatgagtaactgatttttcttcctgagtcgcccttgccaaatatgttactgtattaattaatctaatattgagtgattatttgtaaaattatgaatatgggaaatccatctatctacagcctaagttacacataagtttcagaaagtctgattagactaaagagatatttcttctgggacagccttcttcttggtaattttgaagttctttttacaagttccttcctcagtttcagttctttccagtgttttgtagctcactgtcactcactgaatagagaaacgtgtgccctatacttcctgtgacaatcattttgctgacagaatgatggatgtttaaaatattgcacaaagtactttaaagaaaggtctgttaggaccagaagcagagacaccacttttcaaaggacttcttggtttcagcataacctaagacagggaattgggagccatcatatgtcacagtgttcagaattcaagcatatttaagggcattttctttgattctcaaagttcagcattcattttgaattgagaagcctatacatttagctgacaaagtgcttatagaatttcttaacaactgaaccattcaaaaggattttttttgtttaaaactggatttcaatgtaagcaaatgaagaaaaaaatatagatttcatttccatagcttcttatccctgtattgaggtaataaattgttttactgacaatttttcctttttctacactaaaacaatatgtgatatatttcccctcttgaagaggcaattcattaaactctcaaattttctatagaatcaagatagaacctttagatactccaactcaccaaaatgtaaaaaaactaacaaaaatatttggtcttcaataatgctaaatatctacatttttagaatttatcaacatttaactagataattgggcatgtcttaattatgcatgtacttatccatactaataaaattgacaatgctagtgcatacttattggtttagtcctattatcaggatataatcatctgtgaggaggatattttaaatactgtaaatgataacagttaatgatatacacatttagactgagttgcacactggcagggagaccaaaaacattacttccatacttgtgtcatgattcttttttttttgagagagtctcactctgtcgccaggctggagtacagtggcatgatctcggctcactgcaacctctgcctcccgggttcaagcaattctcctgcctcagccacccaagtagctgggactacaggtgcgtgccaccacgcccagctaaattttgtatttttagtggagacggggtttcaccatgttggccaggatggtctcaatctcctgaccctgcgatctgcccacctcagcctcccaaagtgctgggattacaggcgtaagccaccgggcctggcctgttttatgattcttaatagttacttggtttaaatcacatttgatactatccttctgaaaagtctgagacagatctacaaactacagtcaaaattatagattaagaggaatgaatgcacctatttggctttaagttgaagatgaattatttctcatgctcattttcttgcggcagttatcttagaaagacccccaaaggctttgtgattgtaagcactgtcatgatcacagaatgcaagcttctggtaccatgatcctcaacttagagaggaagaaaccaagacagagagcttaactcacttctctcagggaaagcttttctaaccagacttgatttcctcatgttctagaaagatcactaatggtcaagtg

SEQ ID NO: 455 - DNA, 4736 bp, Homo sapiens
cgagcccggcccgcgaacgtcacgtccctgcgcgctccctgcactctcccgagctgcgctaggcgggcgccacggctgcccggcgaaggaaaccgaaaccgagtccgggcccgtccctccgcggccccatccgcccggtgcacccggggccgcgctcgccaggccgcggagcccagagctgcgcgcacgaaccgtgcgccgggagggcgtgggcgtggcgccgaagggtcccgggtcttcgacgcctctgcggcggctcctccctccttgcagttggatccctggcgggtgcggcccggcccggcccgtgagcggcgcacagaatgggccgatgctgcttctacacggcggggacgttgtccctgctcctgctggtgaccagcgtcacgctgctggtggcccgggtcttccagaaggctgtagaccagagtatcgagaagaaaattgtgttaaggaatggtactgaggcatttgactcctgggagaagccccctctgcctgtgtatactcagttctatttcttcaatgtcaccaatccagaggagatcctcagaggggagacccctcgggtggaagaagtggggccatacacctacagggaactcagaaacaaagcaaatattcaatttggagataatggaacaacaatatctgctgttagcaacaaggcctatgtttttgaacgagaccaatctgttggagaccctaaaattgacttaattagaacattaaatattcctgtattgactgtcatagagtggtcccaggtgcacttcctcagggagatcatcgaggccatgttgaaagcctatcagcagaagctctttgtgactcacacagttgacgaattgctctggggctacaaagatgaaatcttgtcccttatccatgttttcaggcccgatatctctccctattttggcctattctatgagaaaaatgggactaatgatggagactatgtttttctaactggagaagacagttaccttaactttacaaaaattgtggaatggaatgggaaaacgtcacttgactggtggataacagacaagtgcaatatgattaatggaacagatggagattcttttcacccactaataaccaaagatgaggtcctttatgtcttcccatctgacttttgcaggtcagtgtatattactttcagtgactatgagagtgtacagggactgcctgcctttcggtataaagttcctgcagaaatattagccaatacgtcagacaatgccggcttctgtatacctgagggaaactgcctgggctcaggagttctgaatgtcagcatctgcaagaatggtgcacccatcattatgtctttcccacacttttaccaagcagatgagaggtttgtttctgccatagaaggcatgcacccaaatcaggaagaccatgagacatttgtggacattaatcctttgactggaataatcctaaaagcagccaagaggttccaaatcaacatttatgtcaaaaaattagatgactttgttgaaacgggagacattagaaccatggttttcccagtgatgtacctcaatgagagtgttcacattgataaagagacggcgagtcgactgaagtctatgattaacactactttgatcatcaccaacataccctacatcatcatggcgctgggtgtgttctttggtttggtttttacctggcttgcatgcaaaggacagggatccatggatgagggaacagcggatgaaagagcacccctcattcgaacctaaacattgcctttgcttggtgaagaaactgtgtgagctgtcctgacctggacgatgacgtggggaaaccctccacctccttgcaggcttgttgcctgttgaaagaaggaaaaagacacggcgctggcaagtgataggaacattctggccagaggttaaagagcaggctgacatggctggccattaagctttataaaatcatgtgggctctgaaattgttcttttatgtgtctagcaagtatttaataaacccttgtatagtaattttgttgttgttgggtgctggtagctccagaattttgtgaccactattgtgggtaaaatgtctctgcatcacttgttaatgctactggtctaacttcattcagtatgcttcattcaccgaactttgtgctcaaaatgcgtatataccattttatgttgtattcctccatttcacttgcaaaacagaagtaaataagagttcgggacccagggtaaaatggtagcttcatccaatatatcattcaaatgcatctgatttctaaaacatattacattttatgctgatcttcagttcataattcttccaggaaaactcagtcttccaactgcaataaaatactgggtagaatcaaatgggaaaggggttgggtggggcaatacccatgagttgatagtgataagctcctaaggatttttaacttgtacttttgtgaacgaagagaatgcataaataatgttggtgaggataaagtacagatatttcatgtagaattaattgctagttatgatgcttgtggatagttaactgttttttttttagtcaaaatgatcatgctacgaaaagatgcttctgagagaatgtaatgagtaactgatttttcttcctgagtcgcccttgccaaatatgttactgtattaattaatctaatattgagtgattatttgtaaaattatgaatatgggaaatccatctatctacagcctaagttacacataagtttcagaaagtctgattagactaaagagatatttcttctgggacagccttcttcttggtaattttgaagttctttttacaagttccttcctcagtttcagttctttccagtgttttgtagctcactgtcactcactgaatagagaaacgtgtgccctatacttcctgtgacaatcattttgctgacagaatgatggatgtttaaaatattgcacaaagtactttaaagaaaggtctgttaggaccagaagcagagacaccacttttcaaaggacttcttggtttcagcataacctaagacagggaattgggagccatcatatgtcacagtgttcagaattcaagcatatttaagggcattttctttgattctcaaagttcagcattcattttgaattgagaagcctatacatttagctgacaaagtgcttatagaatttcttaacaactgaaccattcaaaaggattttttttgtttaaaactggatttcaatgtaagcaaatgaagaaaaaaatatagatttcatttccatagcttcttatccctgtattgaggtaataaattgttttactgacaatttttcctttttctacactaaaacaatatgtgatatatttcccctcttgaagaggcaattcattaaactctcaaattttctatagaatcaagatagaacctttagatactccaactcaccaaaatgtaaaaaaactaacaaaaatatttggtcttcaataatgctaaatatctacatttttagaatttatcaacatttaactagataattgggcatgtcttaattatgcatgtacttatccatactaataaaattgacaatgctagtgcatacttattggtttagtcctattatcaggatataatcatctgtgaggaggatattttaaatactgtaaatgataacagttaatgatatacacatttagactgagttgcacactggcagggagaccaaaaacattacttccatacttgtgtcatgattcttttttttttgagagagtctcactctgtcgccaggctggagtacagtggcatgatctcggctcactgcaacctctgcctcccgggttcaagcaattctcctgcctcagccacccaagtagctgggactacaggtgcgtgccaccacgcccagctaaattttgtatttttagtggagacggggtttcaccatgttggccaggatggtctcaatctcctgaccctgcgatctgcccacctcagcctcccaaagtgctgggattacaggcgtaagccaccgggcctggcctgttttatgattcttaatagttacttggtttaaatcacatttgatactatccttctgaaaagtctgagacagatctacaaactacagtcaaaattatagattaagaggaatgaatgcacctatttggctttaagttgaagatgaattatttctcatgctcattttcttgcggcagttatcttagaaagacccccaaaggctttgtgattgtaagcactgtcatgatcacagaatgcaagcttctggtaccatgatcctcaacttagagaggaagaaaccaagacagagagcttaactcacttctctcagggaaaattaggagttgagcacaggacaggaaatgggctttgccacttttagctccaggcttttctaaccagacttgatttcctcatgttctagaaagatcactaatggtcaagtggaacaagcactacacgactaacccctattggggtttttaacttaagggaggctaatttttaatttaaactgctcgagatatgagttctgcaaaaggtggtccgcatccttggccctctggacattatcactaaattgcttgtgcctgttaacaagaatactgaccagaatgctcttcatgtagcttatacagttggttcacttcatgcggttcttgacatgtttatttctacccttaatgcaatgaaatgtttcattaataaaaaaccactttatataaaa

SEQ ID NO: 456 - DNA, 3955 bp, Homo sapiens
tgtcccttcccttggtatccctatgacttacctgttggacaggtagggggaaggggagagtaatgagtctcacctgctcagagcaagggtggggcaagacacaccccatcccttccattggttttttccttagtcttactgacagagccttgtccaatcaggaggaagtaactttctatctgccaatagatgcaatgttaggatgagacctcaagttagagtccatccctagagccgactggcagtccccggggccaatggcaagcggataaacagaggcggccgtggaagaggactggaggcgaggctccgcccctccacgggacagtcaggcgagatagccagtgagctcgcaccagagggtgggcgtctcccccaggggcggagcttcgaggtggcgaggggcgtggcttggctgtcaggtctcttcgccttttgttcggttactgagttgctgccttggccagagtccggagcagccgccgcccgaccacgccgagctcagttcgctgtccgcgccggctcccaccccggcccgaccccgacccggcccggtcaggccccatactcagtagccacgatggaggtgatgaacctgatggagcagcctatcaaggtgactgagtggcagcagacatacacctacgactcgggtatccactcgggcgccaacacctgcgtgccctccgtcagcagcaagggcatcatggaggaggatgaggcctgcgggcgccagtacacgctcaagaaaaccaccacttacacccagggggtgccccccagccaaggtgacctggagtaccagatgtccacaacagccagggccaaacgggtgcgggaggccatgtgccctggtgtgtcaggcgaggacagctcgcttctgctggccacccaggtggaggggcaggccaccaacctgcagcgactggccgagccgtcccagctgctcaagtcggccattgtgcatctcatcaactaccaggacgatgccgagctggccactcgcgccctgcccgagctcaccaaactgctcaacgacgaggacccggtggtggtgaccaaggcggccatgattgtgaaccagctgtcgaagaaggaggcgtcgcggcgggccctgatgggctcgccccagctggtggccgctgtcgtgcgtaccatgcagaataccagcgacctggacacagcccgctgcaccaccagcatcctgcacaacctctcccaccaccgggaggggctgctcgccatcttcaagtcgggtggcatccctgctctggtccgcatgctcagctcccctgtggagtcggtcctgttctatgccatcaccacgctgcacaacctgctcctgtaccaggagggcgccaagatggccgtgcgcctggccgacgggctgcaaaagatggtgcccctgctcaacaagaacaaccccaagttcctggccatcaccaccgactgcctgcagctcctggcctacggcaaccaggagagcaagctgatcatcctggccaatggtgggccccaggccctcgtgcagatcatgcgtaactacagttatgaaaagctgctctggaccaccagtcgtgtgctcaaggtgctatccgtgtgtcccagcaataagcctgccattgtggaggctggtgggatgcaggccctgggcaagcacctgaccagcaacagcccccgcctggtgcagaactgcctgtggaccctgcgcaacctctcagatgtggccaccaagcaggagggcctggagagtgtgctgaagattctggtgaatcagctgagtgtggatgacgtcaacgtcctcacctgtgccacgggcacactctccaacctgacatgcaacaacagcaagaacaagacgctggtgacacagaacagcggtgtggaggctctcatccatgccatcctgcgtgctggtgacaaggacgacatcacggagcctgccgtctgcgctctgcgccacctcactagccgccaccctgaggccgagatggcccagaactctgtgcgtctcaactatggcatcccagccatcgtgaagctgctcaaccagcccaaccagtggccactggtcaaggcaaccatcggcttgatcaggaatctggccctgtgcccagccaaccatgccccgctgcaggaggcagcggtcatcccccgcctcgtccaactgctggtgaaggcccaccaggatgcccagcgccacgtagctgcaggcacacagcagccctacacggatggtgtgaggatggaggagattgtggagggctgcaccggagcactgcacatcctcgcccgggaccccatgaaccgcatggagatcttccggctcaacaccattcccctgtttgtgcagctcctgtactcgtcggtggagaacatccagcgcgtggctgccggggtgctgtgtgagctggcccaggacaaggaggcggccgacgccattgatgcagagggggcctcggccccactcatggagttgctgcactcccgcaacgagggcactgccacctacgctgctgccgtcctgttccgcatctccgaggacaagaacccagactaccggaagcgcgtgtccgtggagctcaccaactccctcttcaagcatgacccggctgcctgggaggctgcccagagcatgattcccatcaatgagccctatggagatgacttggatgccacctaccgccccatgtactccagcgatgtgccccttgacccgctggagatgcacatggacatggatggagactaccccatcgacacctacagcgacggcctcaggcccccgtaccccactgcagaccacatgctggcctaggcggcctggccccagtacggccccctctttgcaggcttttcctcctctctagaacctccttctgttggaggccctcccatctccccgctgaaacctgcgctccttttttggggggatcctttgctgctgagcttccccaagcacggtgtgccctggcctgccttcttcttgtgtctttggtggggatggggaggcctattcctgctggccccttctgggggtggtgggcaggtgacacggagtggcttgagcttctggggatgcaggtccaccgagcccctgacccctgtctgtccccgctcccctaacaggtgcggttcctcatctgagaggctctccgtgcaggcgatggggcaagacagaaaagtgcctgagctggggaagccggggtgtaacttcctgctgcaccctgcgcctccagaggtcctccgtagggtctttcttgggatagtgttctgctcctgcttttctgtcctgggcatgggtccagggcctgacaccccctccccgcccctgtggccctggccactaaagcttcagactcaagtacccattctgttttcccccagcaacgcccctccaaacctccagcctccctgtctccagctgcctgggcccggaagggctttggttccttctctgggtctgattttctcactgaactccaccgaccaactgccctaagcccccagggcctccagggcccaggttcgagacccaaacccccaaaatccaaaacttctcttgaaaagttcagggaccgtccaggggagatggggaggagatatggagtgagtcacctgctccagaagatgccagcttctctctccagggtgcttagttggctttgcccacccctcactccccagggagctctggggacagcttcctcacacccctgtcccacccacacagctgccctagctgaccccgagaagtgctcttggctgacccctctggtgtgtggtgaggggctttctcttccccttcctgtttcagacccccccatttcccgcacatggtgtggggggctgggggaggtccaagcagagtgttttattattatcgctttatgtttttggttattggtttttttgtatagaccaaagcaaagaaaataaaaataacacagatgcg

SEQ ID NO: 457 - DNA, 3658 bp, Homo sapiens
tgtcccttcccttggtatccctatgacttacctgttggacaggtagggggaaggggagagtaatgagtctcacctgctcagagcaagggtggggcaagacacaccccatcccttccattggttttttccttagtcttactgacagagccttgtccaatcaggaggaagtaactttctatctgccaatagatgcaatgttaggatgagacctcaagttagagtccatccctagagccgactggcagtccccggggccaatggcaagcggataaacagaggcggccgtggaagaggactggaggcgaggctccgcccctccacgggacagtcaggcgagatagccagtgagctcgcaccagagggtgggcgtctcccccaggggcggagcttcgaggtggcgaggggcgtggcttggctgtcaggtctcttcgccttttgttcggttactgagttgctgccttggccagagtccggagcagccgccgcccgaccacgccgagctcagttcgctgtccgcgccggctcccaccccggcccgaccccgacccggcccggtcaggccccatactcagtagccacgatggaggtgatgaacctgatggagcagcctatcaaggtgactgagtggcagcagacatacacctacgactcgggtatccactcgggcgccaacacctgcgtgccctccgtcagcagcaagggcatcatggaggaggatgaggcctgcgggcgccagtacacgctcaagaaaaccaccacttacacccagggggtgccccccagccaaggtgacctggagtaccagatgtccacaacagccagggccaaacgggtgcgggaggccatgtgccctggtgtgtcaggcgaggacagctcgcttctgctggccacccaggtggaggggcaggccaccaacctgcagcgactggccgagccgtcccagctgctcaagtcggccattgtgcatctcatcaactaccaggacgatgccgagctggccactcgcgccctgcccgagctcaccaaactgctcaacgacgaggacccggtggtggtgaccaaggcggccatgattgtgaaccagctgtcgaagaaggaggcgtcgcggcgggccctgatgggctcgccccagctggtggccgctgtcgtgcgtaccatgcagaataccagcgacctggacacagcccgctgcaccaccagcatcctgcacaacctctcccaccaccgggaggggctgctcgccatcttcaagtcgggtggcatccctgctctggtccgcatgctcagctcccctgtggagtcggtcctgttctatgccatcaccacgctgcacaacctgctcctgtaccaggagggcgccaagatggccgtgcgcctggccgacgggctgcaaaagatggtgcccctgctcaacaagaacaaccccaagttcctggccatcaccaccgactgcctgcagctcctggcctacggcaaccaggagagcaagctgatcatcctggccaatggtgggccccaggccctcgtgcagatcatgcgtaactacagttatgaaaagctgctctggaccaccagtcgtgtgctcaaggtgctatccgtgtgtcccagcaataagcctgccattgtggaggctggtgggatgcaggccctgggcaagcacctgaccagcaacagcccccgcctggtgcagaactgcctgtggaccctgcgcaacctctcagatgtggccaccaagcaggagggcctggagagtgtgctgaagattctggtgaatcagctgagtgtggatgacgtcaacgtcctcacctgtgccacgggcacactctccaacctgacatgcaacaacagcaagaacaagacgctggtgacacagaacagcggtgtggaggctctcatccatgccatcctgcgtgctggtgacaaggacgacatcacggagcctgccgtctgcgctctgcgccacctcactagccgccaccctgaggccgagatggcccagaactctgtgcgtctcaactatggcatcccagccatcgtgaagctgctcaaccagcccaaccagtggccactggtcaaggcaaccatcggcttgatcaggaatctggccctgtgcccagccaaccatgccccgctgcaggaggcagcggtcatcccccgcctcgtccaactgctggtgaaggcccaccaggatgcccagcgccacgtagctgcaggcacacagcagccctacacggatggtgtgaggatggaggagattgtggagggctgcaccggagcactgcacatcctcgcccgggaccccatgaaccgcatggagatcttccggctcaacaccattcccctgtttgtgcagctcctgtactcgtcggtggagaacatccagcgcgtggctgccggggtgctgtgtgagctggcccaggacaaggaggcggccgacgccattgatgcagagggggcctcggccccactcatggagttgctgcactcccgcaacgagggcactgccacctacgctgctgccgtcctgttccgcatctccgaggacaagaacccagactaccggaagcgcgtgtccgtggagctcaccaactccctcttcaagcatgacccggctgcctgggaggctgcccagagcatgattcccatcaatgagccctatggagatgacttggatgccacctaccgccccatgtactccagcgatgtgccccttgacccgctggagatgcacatggacatggatggagactaccccatcgacacctacagcgacggcctcaggcccccgtaccccactgcagaccacatgctggcctaggcggcctggccccagtgcggttcctcatctgagaggctctccgtgcaggcgatggggcaagacagaaaagtgcctgagctggggaagccggggtgtaacttcctgctgcaccctgcgcctccagaggtcctccgtagggtctttcttgggatagtgttctgctcctgcttttctgtcctgggcatgggtccagggcctgacaccccctccccgcccctgtggccctggccactaaagcttcagactcaagtacccattctgttttcccccagcaacgcccctccaaacctccagcctccctgtctccagctgcctgggcccggaagggctttggttccttctctgggtctgattttctcactgaactccaccgaccaactgccctaagcccccagggcctccagggcccaggttcgagacccaaacccccaaaatccaaaacttctcttgaaaagttcagggaccgtccaggggagatggggaggagatatggagtgagtcacctgctccagaagatgccagcttctctctccagggtgcttagttggctttgcccacccctcactccccagggagctctggggacagcttcctcacacccctgtcccacccacacagctgccctagctgaccccgagaagtgctcttggctgacccctctggtgtgtggtgaggggctttctcttccccttcctgtttcagacccccccatttcccgcacatggtgtggggggctgggggaggtccaagcagagtgttttattattatcgctttatgtttttggttattggtttttttgtatagaccaaagcaaagaaaataaaaataacacagatgcg

SEQ ID NO: 458 - DNA, 3132 bp, Homo sapiens
gactggcagtccccggggccaatggcaagcggataaacagaggcggccgtggaagaggactggaggcgaggctccgcccctccacgggacagtcaggcgagatagccagtgagctcgcaccagaggtagccacgatggaggtgatgaacctgatggagcagcctatcaaggtgactgagtggcagcagacatacacctacgactcgggtatccactcgggcgccaacacctgcgtgccctccgtcagcagcaagggcatcatggaggaggatgaggcctgcgggcgccagtacacgctcaagaaaaccaccacttacacccagggggtgccccccagccaaggtgacctggagtaccagatgtccacaacagccagggccaaacgggtgcgggaggccatgtgccctggtgtgtcaggcgaggacagctcgcttctgctggccacccaggtggaggggcaggccaccaacctgcagcgactggccgagccgtcccagctgctcaagtcggccattgtgcatctcatcaactaccaggacgatgccgagctggccactcgcgccctgcccgagctcaccaaactgctcaacgacgaggacccggtggtggtgaccaaggcggccatgattgtgaaccagctgtcgaagaaggaggcgtcgcggcgggccctgatgggctcgccccagctggtggccgctgtcgtgcgtaccatgcagaataccagcgacctggacacagcccgctgcaccaccagcatcctgcacaacctctcccaccaccgggaggggctgctcgccatcttcaagtcgggtggcatccctgctctggtccgcatgctcagctcccctgtggagtcggtcctgttctatgccatcaccacgctgcacaacctgctcctgtaccaggagggcgccaagatggccgtgcgcctggccgacgggctgcaaaagatggtgcccctgctcaacaagaacaaccccaagttcctggccatcaccaccgactgcctgcagctcctggcctacggcaaccaggagagcaagctgatcatcctggccaatggtgggccccaggccctcgtgcagatcatgcgtaactacagttatgaaaagctgctctggaccaccagtcgtgtgctcaaggtgctatccgtgtgtcccagcaataagcctgccattgtggaggctggtgggatgcaggccctgggcaagcacctgaccagcaacagcccccgcctggtgcagaactgcctgtggaccctgcgcaacctctcagatgtggccaccaagcaggagggcctggagagtgtgctgaagattctggtgaatcagctgagtgtggatgacgtcaacgtcctcacctgtgccacgggcacactctccaacctgacatgcaacaacagcaagaacaagacgctggtgacacagaacagcggtgtggaggctctcatccatgccatcctgcgtgctggtgacaaggacgacatcacggagcctgccgtctgcgctctgcgccacctcactagccgccaccctgaggccgagatggcccagaactctgtgcgtctcaactatggcatcccagccatcgtgaagctgctcaaccagcccaaccagtggccactggtcaaggcaaccatcggcttgatcaggaatctggccctgtgcccagccaaccatgccccgctgcaggaggcagcggtcatcccccgcctcgtccaactgctggtgaaggcccaccaggatgcccagcgccacgtagctgcaggcacacagcagccctacacggatggtgtgaggatggaggagattgtggagggctgcaccggagcactgcacatcctcgcccgggaccccatgaaccgcatggagatcttccggctcaacaccattcccctgtttgtgcagctcctgtactcgtcggtggagaacatccagcgcgtggctgccggggtgctgtgtgagctggcccaggacaaggaggcggccgacgccattgatgcagagggggcctcggccccactcatggagttgctgcactcccgcaacgagggcactgccacctacgctgctgccgtcctgttccgcatctccgaggacaagaacccagactaccggaagcgcgtgtccgtggagctcaccaactccctcttcaagcatgacccggctgcctgggaggctgcccagagcatgattcccatcaatgagccctatggagatgacttggatgccacctaccgccccatgtactccagcgatgtgccccttgacccgctggagatgcacatggacatggatggagactaccccatcgacacctacagcgacggcctcaggcccccgtaccccactgcagaccacatgctggcctaggcggcctggccccagtgcggttcctcatctgagaggctctccgtgcaggcgatggggcaagacagaaaagtgcctgagctggggaagccggggtgtaacttcctgctgcaccctgcgcctccagaggtcctccgtagggtctttcttgggatagtgttctgctcctgcttttctgtcctgggcatgggtccagggcctgacaccccctccccgcccctgtggccctggccactaaagcttcagactcaagtacccattctgttttcccccagcaacgcccctccaaacctccagcctccctgtctccagctgcctgggcccggaagggctttggttccttctctgggtctgattttctcactgaactccaccgaccaactgccctaagcccccagggcctccagggcccaggttcgagacccaaacccccaaaatccaaaacttctcttgaaaagttcagggaccgtccaggggagatggggaggagatatggagtgagtcacctgctccattcctcacacccctgtcccacccacacagctgccctagctgaccccgagaagtgctcttggctgacccctctggtgtgtggtgaggggctttctcttccccttcctgtttcagacccccccatttcccgcacatggtgtggggggctgggggaggtccaagcagagtgttttattattatcgctttatgtttttggttattggtttttttgtatagaccaaagcaaagaaaataaaaataacacagatg

SEQ ID NO: 459 - DNA, 3487 bp, Homo sapiens
cgccagagtccggagcagccgccgcccgaccgcgccgagctcagttcgctgtccgcgccggctcccaccccggcccgaccccgacccggcccggtcaggccccatactcagtagccacgatggaggtgatgaacctgatggagcagcctatcaaggtgactgagtggcagcagacatacacctacgactcgggtatccactcgggcgccaacacctgcgtgccctccgtcagcagcaagggcatcatggaggaggatgaggcctgcgggcgccagtacacgctcaagaaaaccaccacttacacccagggggtgccccccagccaaggtgacctggagtaccagatgtccacaacagccagggccaaacgggtgcgggaggccatgtgccctggtgtgtcaggcgaggacagctcgcttctgctggccacccaggtggaggggcaggccaccaacctgcagcgactggccgagccgtcccagctgctcaagtcggccattgtgcatctcatcaactaccaggacgatgccgagctggccactcgcgccctgcccgagctcaccaaactgctcaacgacgaggacccggtggtggtgaccaaggcggccatgattgtgaaccagctgtcgaagaaggaggcgtcgcggcgggccctgatgggctcgccccagctggtggccgctgtcgtgcgtaccatgcagaataccagcgacctggacacagcccgctgcaccaccagcatcctgcacaacctctcccaccaccgggaggggctgctcgccatcttcaagtcgggtggcatccctgctctggtccgcatgctcagctcccctgtggagtcggtcctgttctatgccatcaccacgctgcacaacctgctcctgtaccaggagggcgccaagatggcgtgcgctggccgacgggcgcaaaagatggtgcccctgctcaacaagaacaaccccaagttcctggccatcaccaccgactgcctgcagctcctggcctacggcaaccaggagagcaagctgatcatcctggccaatggtgggccccaggccctcgtgcagatcatgcgtaactacagttatgaaaagctgctctggaccaccagtcgtgtgctcaaggtgctatccgtgtgtcccagcaataagcctgccattgtggaggctggtgggatgcaggccctgggcaagcacctgaccagcaacagcccccgcctggtgcagaactgcctgtggaccctgcgcaacctctcagatgtggccaccaagcaggagggcctggagagtgtgctgaagattctggtgaatcagctgagtgtggatgacgtcaacgtcctcacctgtgccacgggcacactctccaacctgacatgcaacaacagcaagaacaagacgctggtgacacagaacagcggtgtggaggctctcatccatgccatcctgcgtgctggtgacaaggacgacatcacggagcctgccgtctgcgctctgcgccacctcactagccgccaccctgaggccgagatggcccagaactctgtgcgtctcaactatggcatcccagccatcgtgaagctgctcaaccagcccaaccagtggccactggtcaaggcaaccatcggcttgatcaggaatctggccctgtgcccagccaaccatgccccgctgcaggaggcagcggtcatcccccgcctcgtccaactgctggtgaaggcccaccaggatgcccagcgccacgtagctgcaggcacacagcagccctacacggatggtgtgaggatggaggagattgtggagggctgcaccggagcactgcacatcctcgcccgggaccccatgaaccgcatggagatcttccggctcaacaccattcccctgtttgtgcagctcctgtactcgtcggtggagaacatccagcgcgtggctgccggggtgctgtgtgagctggcccaggacaaggaggcggccgacgccattgatgcagagggggcctcggccccactcatggagttgctgcactcccgcaacgagggcactgccacctacgctgctgccgtcctgttccgcatctccgaggacaagaacccagactaccggaagcgcgtgtccgtggagctcaccaactccctcttcaagcatgacccggctgcctgggaggctgcccagagcatgattcccatcaatgagccctatggagatgacatggatgccacctaccgccccatgtactccagcgatgtgccccttgacccgctggagatgcacatggacatggatggagactaccccatcgacacctacagcgacggcctcaggcccccgtaccccactgcagaccacatgctggcctaggcggcctggccccagtgacggccccctctttgcaggcttttcctcctctctagaacctccttctgttggaggccctcccatctccccgctgaaacctgcgctccttttttggggggatcctttgctgctgagcttccccaagcacggtgtgccctggcctgccttcttcttgtgtctttggtggggatggggaggcctattcctgctggccccttctgggggtggtgggcaggtgacacggagtggcttgagcttctggggatgcaggtccaccgagcccctgacccctgtctgtccccgctcccctaacaggtgcggttcctcatctgagaggctctccgtgcaggcgatggggcaagacagaaaagtgcctgagctggggaagccggggtgtaacttcctgctgcaccctgcgcctccagaggtcctccgtagggtctttcttgggatagtgttctgctcctgcttttctgtcctgggcatgggtccagggcctgacaccccctccccgcccctgtggccctggccactaaagcttcagactcaagtacccattctgttttcccccagcaacgcccctccaaacctccagcctccctgtctccagctgcctgggcccggaagggctttggttccttctctgggtctgattttctcactgaactccaccgaccaactgccctaagcccccagggcctccagggcccaggttcgagacccaaacccccaaaatccaaaacttctcttgaaaagttcagggaccgtccaggggagatggggaggagatatggagtgagtcacctgctccagaagatgccagcttctctctccagggtgcttagttggctttgcccacccctcactccccagggagctccggggacagcttcctcacacccctgtcccacccacacagctgccctagctgaccccgagaagtgctcttggctgacccctctggtgtgtggtgaggggctttctcttccccttcctgtttcagacccccccatttcccgcacatggtgtggggggctgggggaggtccaagcagagtgttttattattatcgctttatgtttttggttattggtttttttgtatagaccaaagcaaagaaaataaaaataacacag

SEQ ID NO: 460 - DNA, 2342 bp, Homo sapiens
agctgccgctgtcgtctttgcttcagccgcagtcgccactggctgcctgaggtgctcttacagcctgttccaagtgtggcttaatccgtctccaccaccagatctttctccgtggattcctctgctaagaccgctgccatgccagtgacggtaacccgcaccaccatcacaaccaccacgacgtcatcttcgggcctggggtcccccatgatcgtggggtcccctcgggccctgacacagcccctgggtctccttcgcctgctgcagctggtgtctacctgcgtggccttctcgctggtggctagcgtgggcgcctggacggggtccatgggcaactggtccatgttcacctggtgcttctgcttctccgtgaccctgatcatcctcatcgtggagctgtgcgggctccaggcccgcttccccctgtcttggcgcaactaccccaccacctatgtccagttcctgtcccacggccgttcgcgggaccacgccatcgccgccaccttcttctcctgcatcgcgtgtgtggcttacgccaccgaagtggcctggacccgggcccggcccggcgagatcactggctatatggccaccgtacccgggctgctgaaggtgctggagaccttcgttgcctgcatcatcttcgcgttcatcagcgaccccaacctgtaccagcaccagccggccctggagtggtgcgtggcggtgtacgccatctgcttcatcctagcggccatcgccatcctgctgaacctgggggagtgcaccaacgtgctacccatccccttccccagcttcctgtcggggctggccttgctgtctgtcctcctctatgccaccgcccttgttctctggcccctctaccagttcgatgagaagtatggcggccagcctcggcgctcgagagatgtaagctgcagccgcagccatgcctactacgtgtgtgcctgggaccgccgactggctgtggccatcctgacggccatcaacctactggcgtatgtggctgacctggtgcactctgcccacctggtttttgtcaaggtctaagactctcccaagaggctcccgttccctctccaacctctttgttcttcttgcccgagttttctttatggagtacttctttcctccgcctttcctctgttttcctcttcctgtctcccctccctcccacctttttctttccttcccaattccttgcactctaaccagttcttggatgcatcttcttccttccctttcctcttgctgtttccttcctgtgttgttttgttgcccacatcctgttttcacccctgagctgtttctctttttcttttctttctttttttttttttttttaagacggattctcactctgtggcccaggctggagcgcagtggtgcgatctcgactcactgcaacccccgcctcctgggttcaagcgattctcctgccccagcctcccaagtagctgggaggacaggtgtgagctgccgcacccagcctgtttctctttttccactcttcttttttctcatctcttttctgggttgcctgtcggctttcttatctgcctgttttgcaagcaccttctcctgtgtccttgggagccctgagacttctttctctccttgcctccacccacctccaaaggtgctgagctcacatccacaccccttgcagccgtccatgccacagccccccaaggggccccattgccaaagcatgcctgcccaccctcgctgtgccttagtcagtgtgtacgtgtgtgtgtgtgtgtgtttggggggtggggggtgggtagctggggattgggccctctttctcccagtggaggaaggtgtgcagtgtacttcccctttaaattaaaaaacatatatatatatatatttggaggtcagtaatttccaatgggcgggaggcattaagcaccgaccctgggtccctaggccccgcctggcactcagccttgccagagattggctccagaatttttgccaggcttacagaacacccactgcctagaggccatcttaaaggaagcaggggctggatgcctttcatcccaactattctctgtggtatgaaaaagaaaaaaaaaaaaaaagaaggagtcggggccgggcgtggtggctcacgcctgtaatcccagcactttgggagaccaagtcaggcaatcatctgaagtcaggagttcaagaccagcctggccaacatggtgaaagcatgtctctattaaaaatacaaaaattagccgggcgtggtggcgggcgcctgtaatcccaggtatttggggggactgagacaggagaatcccttcaacccgggaggtggaggttgcagtaagtcaagatgg

SEQ ID NO: 461 - DNA, 2475 bp, Homo sapiens
ggagacaccggctctggctgggccgcccgcctccacagccgccgcccagggttctcccgccactgccgcccgcacccccgcccccgcggggttaagatcacacacgcgcccacgccggcccgcggggcgtgcactttcgctgggttccgtccgccgcagcccaaacagttaactgaacggggaggggagggggcggggcttacccggggtcaccgccagggccctgctgggttccacgccacgttcctgtctccgcagggcgttcgatccctagagggaggagcctgtccaaacggacgctaacggcctacctccccctcaggtgctcttacagcctgttccaagtgtggcttaatccgtctccaccaccagatctttctccgtggattcctctgctaagaccgctgccatgccagtgacggtaacccgcaccaccatcacaaccaccacgacgtcatcttcgggcctggggtcccccatgatcgtggggtcccctcgggccctgacacagcccctgggtctccttcgcctgctgcagctggtgtctacctgcgtggccttctcgctggtggctagcgtgggcgcctggacggggtccatgggcaactggtccatgttcacctggtgcttctgcttctccgtgaccctgatcatcctcatcgtggagctgtgcgggctccaggcccgcttccccctgtcttggcgcaacttccccatcaccttcgcctgctatgcggccctcttctgcctctcggcctccatcatctaccccaccacctatgtccagttcctgtcccacggccgttcgcgggaccacgccatcgccgccaccttcttctcctgcatcgcgtgtgtggcttacgccaccgaagtggcctggacccgggcccggcccggcgagatcactggctatatggccaccgtacccgggctgctgaaggtgctggagaccttcgttgcctgcatcatcttcgcgttcatcagcgaccccaacctgtaccagcaccagccggccctggagtggtgcgtggcggtgtacgccatctgcttcatcctagcggccatcgccatcctgctgaacctgggggagtgcaccaacgtgctacccatccccttccccagcttcctgtcggggctggccttgctgtctgtcctcctctatgccaccgcccttgttctctggcccctctaccagttcgatgagaagtatggcggccagcctcggcgctcgagagatgtaagctgcagccgcagccatgcctactacgtgtgtgcctgggaccgccgactggctgtggccatcctgacggccatcaacctactggcgtatgtggctgacctggtgcactctgcccacctggtttttgtcaaggtctaagactctcccaagaggctcccgttccctctccaacctctttgttcttcttgcccgagttttctttatggagtacttctttcctccgcctttcctctgttttcctcttcctgtctcccctccctcccacctttttctttccttcccaattccttgcactctaaccagttcttggatgcatcttcttccttccctttcctcttgctgtttccttcctgtgttgttttgttgcccacatcctgttttcacccctgagctgtttctctttttcttttctttctttttttttttttttttaagacggattctcactctgtggcccaggctggagcgcagtggtgcgatctcgactcactgcaacccccgcctcctgggttcaagcgattctcctgccccagcctcccaagtagctgggaggacaggtgtgagctgccgcacccagcctgtttctctttttccactcttcttttttctcatctcttttctgggttgcctgtcggctttcttatctgcctgttttgcaagcaccttctcctgtgtccttgggagccctgagacttctttctctccttgcctccacccacctccaaaggtgctgagctcacatccacaccccttgcagccgtccatgccacagccccccaaggggccccattgccaaagcatgcctgcccaccctcgctgtgccttagtcagtgtgtacgtgtgtgtgtgtgtgtgtttggggggtggggggtgggtagctggggattgggccctctttctcccagtggaggaaggtgtgcagtgtacttcccctttaaattaaaaaacatatatatatatatatttggaggtcagtaatttccaatgggcgggaggcattaagcaccgaccctgggtccctaggccccgcctggcactcagccttgccagagattggctccagaatttttgccaggcttacagaacacccactgcctagaggccatcttaaaggaagcaggggctggatgcctttcatcccaactattctctgtggtatgaaaaagaaaaaaaaaaaaaaagaaggagtcggggccgggcgtggtggctcacgcctgtaatcccagcactttggg

SEQ ID NO: 462 - DNA, 2314 bp, Homo sapiens
ggagacaccggctctggctgggccgcccgcctccacagccgccgcccagggttctcccgccactgccgcccgcacccccgcccccgcggggttaagatcacacacgcgcccacgccggcccgcggggcgtgcactttcgctgggttccgtccgccgcagcccaaacagttaactgaacggggaggggagggggcggggcttacccggggtcaccgccagggccctgctgggttccacgccacgttcctgtctccgcagggcgttcgatccctagagggaggagcctgtccaaacggacgctaacggcctacctccccctcaggtgctcttacagcctgttccaagtgtggcttaatccgtctccaccaccagatctttctccgtggattcctctgctaagaccgctgccatgccagtgacggtaacccgcaccaccatcacaaccaccacgacgtcatcttcgggcctggggtcccccatgatcgtggggtcccctcgggccctgacacagcccctgggtctccttcgcctgctgcagctggtgtctacctgcgtggccttctcgctggtggctagcgtgggcgcctggacggggtccatgggcaactggtccatgttcacctggtgcttctgcttctccgtgaccctgatcatcctcatcgtggagctgtgcgggctccaggcccgcttccccctgtcttggcgcaacttccccatcaccttcgcctgctatgcggccctcttctgcctctcggcctccatcatctaccccaccacctatgtccagttcctgtcccacggccgttcgcgggaccacgccatcgccgccaccttcttctcctgcatcgcgtgtgtggcttacgccaccgaagtggcctggacccgggcccggcccggcgagatcactggctatatggccaccgtacccgggctgctgaaggtgctggagaccttcgttgcctgcatcatcttcgcgttcatcagcgaccccaacctgtaccagcaccagccggccctggagtggtgcgtggcggtgtacgccatctgcttcatcctagcggccatcgccatcctgctgaacctgggggagtgcaccaacgtgctacccatccccttccccagcttcctgtcggggctggccttgctgtctgtcctcctctatgccaccgcccttgttctctggcccctctaccagttcgatgagaagtatggcggccagcctcggcgctcgagagatgtaagctgcagccgcagccatgcctactacgtgtgtgcctgggaccgccgactggctgtggccatcctgacggccatcaacctactggcgtatgtggctgacctggtgcactctgcccacctggtttttgtcaaggtctaagactctcccaagaggctcccgttccctctccaacctctttgttcttcttgcccgagttttctttatggagtacttctttcctccgcctttcctctgttttcctcttcctgtctcccctccctcccacctttttctttccttcccaattccttgcactctaaccagttcttggatgcatcttcttccttccctttcctcttgctgtttccttcctgtgttgttttgttgcccacatcctgttttcacccctgagctgtttctctttttcttttctttctttttttttttttttttaagacggattctcactcttgctccagcctgggggacagagcgagactccatctcaaaaaaaaaaaggaatcggacgaagaaccacaggatgttgaagacaactgtctgaagtatttgtgagggacagcgatgtggccctctgtgttaagaataacgtgtcctgctttggcagagagaagaaaatagccactgcccgctttcaaggcaagatcgaccttttctgttttgttttgtttttctttctttttcctggccatgaggacaaaaattactgagtggcccttaaagagggaagtttgttttcagctgttctcttttgcccgtaggtgggagggtggggattgctgcgtcctagctagaggaatggctttgcttgaatgtgtagtgcacacgcacgggtgtttctgtgtgctagttgcttcttgctgctgcttcctgcttgtctgggactcacatacataacgtgatatatatatatatatataaatgtataaatatatattttatttttttttaaatccttggagcttctggttcctatcagttcctgttgttaatcgtagaaccgttgtcccttcccccattcccgtatccatcatgttctttttcttttaaatatcaatataaaggtaaaagaaggac

SEQ ID NO: 463 - DNA, 4309 bp, Homo sapiens
aggagagccggaggagggggaaggagggaggggagagcggtggcggcggctgcgccgggctgtgagtctctcgccgccggaggaagatgaggctgaagattgggttcatcttacgcagtttgctggtggtgggaagcttcctggggctagtggtcctctggtcttccctgaccccgcggccggacgacccaagcccgctgagcaggatgagggaagacagagatgtcaatgaccccatgcccaaccgaggcggcaatggactagctcctggggaggacagattcaaacctgtggtaccatggcctcatgttgaaggagtagaagtggacttagagtctattagaagaataaacaaggccaaaaatgaacaagagcaccatgctggaggagattcccagaaagatatcatgcagaggcagtatctcacatttaagcctcagacattcacctaccatgatcctgtgcttcgcccagggatcctcggtaactttgaacccaaagaacctgagcctcctggagtggttggtggccctggagagaaagccaagccattggttttgggaccagaattcaaacaagcaattcaagccagcattaaagagtttggatttaacatggtggcaagtgacatgatctcactggaccgcagcgtcaatgacttacgccaagaagaatgcaagtattggcattatgatgaaaacttgctcacttcgagcgttgtcattgtcttccataatgaaggatggtcaaccctcatgagaacagtccacagtgtaattaaaaggactccaaggaaatatttagcagaaattgtgttaattgacgatttcagtaataaagaacacttaaaagaaaaactggatgaatatattaagctgtggaatggcctagtgaaggtatttcgaaatgaaagaagggaaggtttaattcaagcacgaagtattggtgctcagaaggctaaacttggacaggttttgatataccttgatgcccactgtgaggtggcagttaactggtatgcaccacttgtagctcccatatctaaggacagaaccatttgcactgtgccgcttatagatgtcataaatggcaacacatatgaaattataccccaagggggtggtgatgaagatgggtatgcccgaggagcatgggattggagtatgctctggaaacgggtgcctctgacccctcaagagaagagactgagaaagacaaaaactgaaccgtatcggtccccagccatggctgggggattatttgccattgaacgagagttcttctttgaattgggtctctatgatccaggtctccagatttggggtggtgaaaactttgagatctcatacaagatatggcagtgtggtggcaaattattatttgttccttgttctcgtgttggacatatctaccgtcttgagggctggcaaggaaatcctccgcccatttatgttgggtcttctccaactctgaagaattatgttagagttgtggaggtttggtgggatgaatataaagactacttctatgctagtcgtcctgaatcgcaggcattaccatatggggatatatcggagctgaaaaaatttcgagaagatcacaactgcaaaagttttaagtggttcatggaagaaatagcttatgatatcacctcacactaccctttgccacccaaaaatgttgactggggagaaatcagaggcttcgaaactgcttactgcattgatagcatgggaaaaacaaatggaggctttgttgaactaggaccctgccacaggatgggagggaatcagcttttcagaatcaatgaagcaaatcaactcatgcagtatgaccagtgtttgacaaagggagctgatggatcaaaagttatgattacacactgtaatctaaatgaatttaaggaatggcagtacttcaagaacctgcacagatttactcatattccttcaggaaagtgtttagatcgctcagaggtcctgcatcaagtattcatctccaattgtgactccagtaaaacgactcaaaaatgggaaatgaataacatccatagtgtttagagagaaaaaaataaaccaataacctacctactgacaagtaaatttatacaggactgaaaaccgcctgaaacctgctgcaactattgttattaactctgtatagctccaaacctggaacctcctgatcagtttgaaggacattgataaactgtgattttacaataacattatcatctgcagttactgtttacaagactgcttttaccttaaactttgtagatgtttacatctttttgttgtgttttaagatgatgttggtaatttgtgcctttagctctgttttattagacagagttaaagcatgttgtcttctttgggattacactcaggggtctgaaaggcagtttgatttttatttttaacacacttgaaaaaaggttggagtagccagactttcatatataacttggtgattatcaacctgttgtgtctttatttaattttacatctttttgaagcactgccacaggttattagccaaggtggccttccttcacagtcatgctgcttttttgaaaggtgaatttcaacacatttagtgcctctttcatttctcagtatatatttcaagagcttgtgatgaaatctataggatggtaatgatggacttgtcacctgtatggggaatacttttactactcagaaatgaatttatgtgctgccatttgctataaagttgaactttgtatggcttgaaaaagaaatgacaatatggaacatcccaaggctgtcccatagggttggaagttgtgtagcattcactcccttacctactggcattcccagtgccctctgtccatacctacttctaggattgcaaaggagtcttccaactagagaaaaattgtccactgacatttgggatttacttttctccaatacctgccaatacagaaaactattatcagttgttattgttatcccttgaaagcgagggtgacaaaaacaacaaaacaccgttataaacacatcaaaggttcattctgactgaggtaagactttccaagcccttgttagattaggccttataaaacttgtgtgcattataacctaagctgtgcaacctgtgaagccaagagtgaactgatgtttcatttatattttcatccaaatgacattatctgcacgtttttaaaatttaaaaacaaaggactatttaaaaatacagtttattaacaaacgtgaactactttctgttacattaggtgttccctagtgtttcttaatttctttttagaaagtgtatttttattagtatttttccggtgaacagaagatttgtttggatttaaacatttactaagacagtacctattaggaaaaccaaatattgcaaatggtcaattcgattttaatttctcaaaagatactctgttatccagaagattaaaatgcctacattgagtgcttaaaaaaaaaaaaacaactgtgatgatgtgagcagaatggcaagtaagttaagcatttttgatcctgtaatcatggtatcattacaatgaaaggaattcacaaactactgccagaggaagtttgttttttaatttaagagggaaatataacctataaatttgtttcttccaagcttagctcttaaatttggagactcaaagttaaacatcctcaacagagttttatttataattttgaattgtcaatttgtattttgctactgatctgtgatcaaccattttaactttcatctctagggatgtttaacatttataattgcaaaataaaccaactataaaaaaagaaactaagagagaattggtactttaattacttgtgtgtttgcaaataggctccattttccatgttgagtagattataaccttattaactatgcataggcctaagaaaggtggcaatgaactgtgcatgtaaattttaaatgggtactttgtgcaattcgttaaaagaagatactctatgaatatgattctatatattgaaatcagaaaacctaccaaacaaaaacatcagaagctgctgccataatgactattttctactgtaggctgctttggaaataattcccatatccttgctttgtaagttggtaatatcactatgcatttctacacattttataaatttgatttatgcagattttgatacactgtatgtttctgtagaaattgtataaatattcaaaattttattaggataaatttgagaaacttacgtatatcttaattctgggttgcttgttttttaggtgacaaaaataaaatattgtattttaattc

SEQ ID NO: 464 - DNA, 3001 bp, Homo sapiens
ccccactgccacgttcgacgaaggaacgcgcagagtgcgcgcatcccttggccaatcaggaggcgcagagtccgtgctaccgaaaggggcagccattccagacccgtggaaggtgcaggcgaaagccaccaattagaagccaaggcagaaaaagttcttgtcgggagccaatgagaggctaagaaagacagcgagcgcgaggtcctcggccaatcccgaacgaaggccagggagcactcaggagcgtttccgaatccggggccaggcctggtgtgagtgtccaatccgagagcggcaaagacgagcctcgaagtccgccggccaatcgaaggcgggccccagcggcgcgtgcgcgccgcggccagcgcgcgcgggcgggggggcaggcgcgccccggacccaggatttataaaggcgaggccgggaccggcgcgcgctctcgtcgcccccgctgtcccggcggcgccaaccgaagcgccccgcctgatccgtgtccgacatgctgcgccgcgctctgctgtgcctggccgtggccgccctggtgcgcgccgacgcccccgaggaggaggaccacgtcctggtgctgcggaaaagcaacttcgcggaggcgctggcggcccacaagtacctgctggtggagttctatgccccttggtgtggccactgcaaggctctggcccctgagtatgccaaagccgctgggaagctgaaggcagaaggttccgagatcaggttggccaaggtggacgccacggaggagtctgacctggcccagcagtacggcgtgcgcggctatcccaccatcaagttcttcaggaatggagacacggcttcccccaaggaatatacagctggcagagaggctgatgacatcgtgaactggctgaagaagcgcacgggcccggctgccaccaccctgcctgacggcgcagctgcagagtccttggtggagtccagcgaggtggctgtcatcggcttcttcaaggacgtggagtcggactctgccaagcagtttttgcaggcagcagaggccatcgatgacataccatttgggatcacttccaacagtgacgtgttctccaaataccagctcgacaaagatggggttgtcctctttaagaagtttgatgaaggccggaacaactttgaaggggaggtcaccaaggagaacctgctggactttatcaaacacaaccagctgccccttgtcatcgagttcaccgagcagacagccccgaagatttttggaggtgaaatcaagactcacatcctgctgttcttgcccaagagtgtgtctgactatgacggcaaactgagcaacttcaaaacagcagccgagagcttcaagggcaagatcctgttcatcttcatcgacagcgaccacaccgacaaccagcgcatcctcgagttctttggcctgaagaaggaagagtgcccggccgtgcgcctcatcaccctggaggaggagatgaccaagtacaagcccgaatcggaggagctgacggcagagaggatcacagagttctgccaccgcttcctggagggcaaaatcaagccccacctgatgagccaggagctgccggaggactgggacaagcagcctgtcaaggtgcttgttgggaagaactttgaagacgtggcttttgatgagaaaaaaaacgtctttgtggagttctatgccccatggtgtggtcactgcaaacagttggctcccatttgggataaactgggagagacgtacaaggaccatgagaacatcgtcatcgccaagatggactcgactgccaacgaggtggaggccgtcaaagtgcacagcttccccacactcaagttctttcctgccagtgccgacaggacggtcattgattacaacggggaacgcacgctggatggttttaagaaattcctggagagcggtggccaggatggggcaggggatgatgacgatctcgaggacctggaagaagcagaggagccagacatggaggaagacgatgatcagaaagctgtgaaagatgaactgtaatacgcaaagccagacccgggcgctgccgagacccctcgggggctgcacacccagcagcagcgcacgcctccgaagcctgcggcctcgcttgaaggagggcgtcgccggaaacccagggaacctctctgaagtgacacctcacccctacacaccgtccgttcacccccgtctcttccttctgcttttcggtttttggaaagggatccatctccaggcagcccaccctggtggggcttgtttcctgaaaccatgatgtactttttcatacatgagtctgtccagagtgcttgctaccgtgttcggagtctcgctgcctccctcccgcgggaggtttctcctctttttgaaaattccgtctgtgggatttttagacatttttcgacatcagggtatttgttccaccttggccaggcctcctcggagaagcttgtcccccgtgtgggagggacggagccggactggacatggtcactcagtaccgcctgcagtgtcgccatgactgatcatggctcttgcatttttgggtaaatggagacttccggatcctgtcagggtgtcccccatgcctggaagaggagctggtggctgccagccctggggcccggcacaggcctgggccttccccttccctcaagccagggctcctcctcctgtcgtgggctcattgtgaccactggcctctctacagcacggcctgtggcctgttcaaggcagaaccacgacccttgactcccgggtggggaggtggccaaggatgctggagctgaatcagacgctgacagttcttcaggcatttctatttcacaatcgaattgaacacattggccaaataaagttgaaattttaccacctgtccttgcctcgggtttatgatctcaccaagcccggagagctgggctggaatgcggacgccaaggccatctgccaggccttagtggggttactggtgctgagaggcctcgcccctgggacgag

SEQ ID NO: 465 - DNA, 2714 bp, Homo sapiens
ccccactgccacgttcgacgaaggaacgcgcagagtgcgcgcatcccttggccaatcaggaggcgcagagtccgtgctaccgaaaggggcagccattccagacccgtggaaggtgcaggcgaaagccaccaattagaagccaaggcagaaaaagttcttgtcgggagccaatgagaggctaagaaagacagcgagcgcgaggtcctcggccaatcccgaacgaaggccagggagcactcaggagcgtttccgaatccggggccaggcctggtgtgagtgtccaatccgagagcggcaaagacgagcctcgaagtccgccggccaatcgaaggcgggccccagcggcgcgtgcgcgccgcggccagcgcgcgcgggcgggggggcaggcgcgccccggacccaggatttataaaggcgaggccgggaccggcgcgcgctctcgtcgcccccgctgtcccggcggcgccaaccgaagcgccccgcctgatccgtgtccgacatgctgcgccgcgctctgctgtgcctggccgtggccgccctggtgcgcgccgacgcccccgaggaggaggaccacgtcctggtgctgcggaaaagcaacttcgcggaggcgctggcggcccacaagtacctgctggtggagttctatgccccttggtgtggccactgcaaggctctggcccctgagtatgccaaagccgctgggaagctgaaggcagaaggttccgagatcaggttggccaaggtggacgccacggaggagtctgacctggcccagcagtacggcgtgcgcggctatcccaccatcaagttcttcaggaatggagacacggcttcccccaaggaatatacagctggcagagaggctgatgacatcgtgaactggctgaagaagcgcacgggcccggctgccaccaccctgcctgacggcgcagctgcagagtccttggtggagtccagcgaggtggctgtcatcggcttcttcaaggacgtggagtcggactctgccaagcagtttttgcaggcagcagaggccatcgatgacataccatttgggatcacttccaacagtgacgtgttctccaaataccagctcgacaaagatggggttgtcctctttaagaagtttgatgaaggccggaacaactttgaaggggaggtcaccaaggagaacctgctggactttatcaaacacaaccagctgccccttgtcatcgagttcaccgagcagacagccccgaagatttttggaggtgaaatcaagactcacatcctgctgttcttgcccaagagtgtgtctgactatgacggcaaactgagcaacttcaaaacagcagccgagagcttcaagggcaagatcctgttcatcttcatcgacagcgaccacaccgacaaccagcgcatcctcgagttctttggcctgaagaaggaagagtgcccggccgtgcgcctcatcaccctggaggaggagatgaccaagtacaagcccgaatcggaggagctgacggcagagaggatcacagagttctgccaccgcttcctggagggcaaaatcaagccccacctgatgagccaggagctgccggaggactgggacaagcagcctgtcaaggtgcttgttgggaagaactttgaagacgtggcttttgatgagaaaaaaaacgtctttgtggagttctatgccccatggtgtggtcactgcaaacagttggctcccatttgggataaactgggagagacgtacaaggaccatgagaacatcgtcatcgccaagatggactcgactgccaacgaggtggaggccgtcaaagtgcacagcttccccacactcaagttctttcctgccagtgccgacaggacggtcattgattacaacggggaacgcacgctggatggttttaagaaattcctggagagcggtggccaggatggggcaggggatgatgacgatctcgaggacctggaagaagcagaggagccagacatggaggaagacgatgatcagaaagctgtgaaagatgaactgtaatacgcaaagccagacccgggcgctgccgagacccctcgggggctgcacacccagcagcagcgcacgcctccgaagcctgcggcctcgcttgaaggagggcgtcgccggaaacccagggaacctctctgaagtgacacctcacccctacacaccgtccgttcacccccgtctcttccttctgcttttcggtttttggaaagggatccatctccaggcagcccaccctggtggggcttgtttcctgaaaccatgatgtactttttcatacatgagtctgtccagagtgcttgctaccgtgttcggagtctcgctgcctccctcccgcgggaggtttctcctctttttgaaaattccgtctgtgggatttttagacatttttcgacatcaggggtgtcccccatgcctggaagaggagctggtggctgccagccctggggcccggcacaggcctgggccttccccttccctcaagccagggctcctcctcctgtcgtgggctcattgtgaccactggcctctctacagcacggcctgtggcctgttcaaggcagaaccacgacccttgactcccgggtggggaggtggccaaggatgctggagctgaatcagacgctgacagttcttcaggcatttctatttcacaatcgaattgaacacattggccaaataaagttgaaattttaccacc

SEQ ID NO: 466 - DNA, 2492 bp, Homo sapiens
ccccactgccacgttcgacgaaggaacgcgcagagtgcgcgcatcccttggccaatcaggaggcgcagagtccgtgctaccgaaaggggcagccattccagacccgtggaaggtgcaggcgaaagccaccaattagaagccaaggcagaaaaagttcttgtcgggagccaatgagaggctaagaaagacagcgagcgcgaggtcctcggccaatcccgaacgaaggccagggagcactcaggagcgtttccgaatccggggccaggcctggtgtgagtgtccaatccgagagcggcaaagacgagcctcgaagtccgccggccaatcgaaggcgggccccagcggcgcgtgcgcgccgcggccagcgcgcgcgggcgggggggcaggcgcgccccggacccaggatttataaaggcgaggccgggaccggcgcgcgctctcgtcgcccccgctgtcccggcggcgccaaccgaagcgccccgcctgatccgtgtccgacatgctgcgccgcgctctgctgtgcctggccgtggccgccctggtgcgcgccgacgcccccgaggaggaggaccacgtcctggtgctgcggaaaagcaacttcgcggaggcgctggcggcccacaagtacctgctggtggagttctatgccccttggtgtggccactgcaaggctctggcccctgagtatgccaaagccgctgggaagctgaaggcagaaggttccgagatcaggttggccaaggtggacgccacggaggagtctgacctggcccagcagtacggcgtgcgcggctatcccaccatcaagttcttcaggaatggagacacggcttcccccaaggaatatacagctggcagagaggctgatgacatcgtgaactggctgaagaagcgcacgggcccggctgccaccaccctgcctgacggcgcagctgcagagtccttggtggagtccagcgaggtggctgtcatcggcttcttcaaggacgtggagtcggactctgccaagcagtttttgcaggcagcagaggccatcgatgacataccatttgggatcacttccaacagtgacgtgttctccaaataccagctcgacaaagatggggttgtcctctttaagaagtttgatgaaggccggaacaactttgaaggggaggtcaccaaggagaacctgctggactttatcaaacacaaccagctgccccttgtcatcgagttcaccgagcagacagccccgaagatttttggaggtgaaatcaagactcacatcctgctgttcttgcccaagagtgtgtctgactatgacggcaaactgagcaacttcaaaacagcagccgagagcttcaagggcaagatcctgttcatcttcatcgacagcgaccacaccgacaaccagcgcatcctcgagttctttggcctgaagaaggaagagtgcccggccgtgcgcctcatcaccctggaggaggagatgaccaagtacaagcccgaatcggaggagctgacggcagagaggatcacagagttctgccaccgcttcctggagggcaaaatcaagccccacctgatgagccaggagctgccggaggactgggacaagcagcctgtcaaggtgcttgttgggaagaactttgaagacgtggcttttgatgagaaaaaaaacgtctttgtggagttctatgccccatggtgtggtcactgcaaacagttggctcccatttgggataaactgggagagacgtacaaggaccatgagaacatcgtcatcgccaagatggactcgactgccaacgaggtggaggccgtcaaagtgcacagcttccccacactcaagttctttcctgccagtgccgacaggacggtcattgattacaacggggaacgcacgctggatggttttaagaaattcctggagagcggtggccaggatggggcaggggatgatgacgatctcgaggacctggaagaagcagaggagccagacatggaggaagacgatgatcagaaagctgtgaaagatgaactgtaatacgcaaagccagacccgggcgctgccgagacccctcgggggctgcacacccagcagcagcgcacgcctccgaagcctgcggcctcgcttgaaggagggcgtcgccggaaacccagggaacctctctgaagtgacacctcacccctacacaccgtccgttcacccccgtctcttccttctgcttttcggtttttggaaagggatccatctccaggcagcccaccctggtggggcttgtttcctgaaaccatgatgtactttttcatacatgagtctgtccagagtgcttgctaccgtgttcggagtctcgctgcctccctcccgcgggaggtttctcctctttttgaaaattccgtctgtgggatttttagacatttttcgacatcagggtatttgcctcctcggagaagcttgtcccccgtgtgggagggacggagccggactggacatggtcactcagtaccgc

SEQ ID NO: 467 - DNA, 2560 bp, Homo sapiens
cgaaagccaccaattagaagccaaggcagaaaaagttcttgtcgggagccaatgagaggctaagaaagacagcgagcgcgaggtcctcggccaatcccgaacgaaggccagggagcactcaggagcgtttccgaatccggggccaggcctggtgtgagtgtccaatccgagagcggcaaagacgagcctcgaagtccgccggccaatcgaaggcgggccccagcggcgcgtgcgcgccgcggccagcgcgcgcgggcgggggggcaggcgcgccccggacccaggatttataaaggcgaggccgggaccggcgcgcgctctcgtcgcccccgctgtcccggcggcgccaaccgaagcgccccgcctgatccgtgtccgacatgctgcgccgcgctctgctgtgcctggccgtggccgccctggtgcgcgccgacgcccccgaggaggaggaccacgtcctggtgctgcggaaaagcaacttcgcggaggcgctggcggcccacaaatgccccttggtgtggccactgcaaggctctggcccctgagtatgccaaagccgctgggaagctgaaggcagaaggttccgagatcaggttggccaaggtggacgccacggaggagtctgacctggcccagcagtacggcgtgcgcggctatcccaccatcaagttcttcaggaatggagacacggcttcccccaaggaatatacagctggcagagaggctgatgacatcgtgaactggctgaagaagcgcacgggcccggctgccaccaccctgcctgacggcgcagctgcagagtccttggtggagtccagcgaggtggctgtcatcggcttcttcaaggacgtggagtcggactctgccaagcagtttttgcaggcagcagaggccatcgatgacataccatttgggatcacttccaacagtgacgtgttctccaaataccagctcgacaaagatggggttgtcctctttaagaaggtgagccggaacaactttgaaggggaggtcaccaaggagaacctgctggactttatcaaacacaaccagctgccccttgtcatcgagttcaccgagcagccccgaagatttttggaggtgaaatcaagactcacatcctgctgttcttgcccaagagtgtgtctgactatgacggcaaactgagcaacttcaaaacagcagccgagagcttcaagggcaagatcctgttcatcttcatcgacagcgaccacaccgacaaccagcgcatcctcgagttctttggcctgaagaaggaagagtgcccggccgtgcgcctcatcaccctggaggaggagatgaccaagtacaagcccgaatcggaggagctgacggcagagaggatcacagagttctgccaccgcttcctggagggcaaaatcaagccccacctgatgagccaggagctgccggaggactgggacaagcagcctgtcaaggtgcttgttgggaagaactttgaagacgtggcttttgatgagaaaaaaaacgtctttgtggagttctatgccccatggtgtggtcactgcaaacagttggctcccatttgggataaactgggagagacgtacaaggaccatgagaacatcgtcatcgccaagatggactcgactgccaacgaggtggaggccgtcaaagtgcacagcttccccacactcaagttctttcctgccagtgccgacaggacggtcattgattacaacggggaacgcacgctggatggttttaagaaattcctggagagcggtggccaggatggggcaggggatgatgacgatctcgaggacctggaagaagcagaggagccagacatggaggaagacgatgatcagaaagctgtgaaagatgaactgtaatacgcaaagccagacccgggcgctgccgagacccctcgggggctgcacacccagcagcagcgcacgcctccgaagcctgcggcctcgcttgaaggagggcgtcgccggaaacccagggaacctctctgaagtgacacctcacccctacacaccgtccgttcacccccgtctcttccttctgcttttcggtttttggaaagggatccatctccaggcagcccaccctggtggggcttgtttcctgaaaccatgatgtactttttcatacatgagtctgtccagagtgcttgctaccgtgttcggagtctcgctgcctccctcccgcgggaggtttctcctctttttgaaaattccgtctgtgggatttttagacatttttcgacaggtgtcccccatgcctggaagaggagctggtggctgccagccctggggcccggcacaggcctgggccttccccttccctcaagccagggctcctcctcctgtcgtgggctcattgtgaccactggcctctctacagcacggcctgtggcctgttcaaggcagaaccacgacccttgactcccgggtggggaggtggccaaggatgctggagctgaatcagacgctgacagttcttcaggcatttctatttcacaatcgaattgaacacattggccaaataaagttgaaattttaccacc

SEQ ID NO: 468 - DNA, 2441 bp, Homo sapiens
cgaaagccaccaattagaagccaaggcagaaaaagttcttgtcgggagccaatgagaggctaagaaagacagcgagcgcgaggtcctcggccaatcccgaacgaaggccagggagcactcaggagcgtttccgaatccggggccaggcctggtgtgagtgtccaatccgagagcggcaaagacgagcctcgaagtccgccggccaatcgaaggcgggccccagcggcgcgtgcgcgccgcggccagcgcgcgcgggcgggggggcaggcgcgccccggacccaggatttataaaggcgaggccgggaccggcgcgcgctctcgtcgcccccgctgtcccggcggcgccaaccgaagcgccccgcctgatccgtgtccgacatgctgcgccgcgctctgctgtgcctggccgtggccgccctggtgcgcgccgacgcccccgaggaggaggaccacgtcctggtgctgcggaaaagcaacttcgcggaggcgctggcggcccacaaatgccccttggtgtggccactgcaaggctctggcccctgagtatgccaaagccgctgggaagctgaaggcagaaggttccgagatcaggttggccaaggtggacgccacggaggagtctgacctggcccagcagtacggcgtgcgcggctatcccaccatcaagttcttcaggaatggagacacggcttcccccaaggaatatacaggacgtggagtcggactctgccaagcagtttttgcaggcagcagaggccatcgatgacataccatttgggatcacttccaacagtgacgtgttctccaaataccagctcgacaaagatggggttgtcctctttaagaagtttgatgaaggccggaacaactttgaaggggaggtcaccaaggagaacctgctggactttatcaaacacaaccagctgccccttgtcatcgagttcaccgagcagacagccccgaagatttttggaggtgaaatcaagactcacatcctgctgttcttgcccaagagtgtgtctgactatgacggcaaactgagcaacttcaaaacagcagccgagagcttcaagggcaagatcctgttcatcttcatcgacagcgaccacaccgacaaccagcgcatcctcgagttctttggcctgaagaaggaagagtgcccggccgtgcgcctcatcaccctggaggaggagatgaccaagtacaagcccgaatcggaggagctgacggcagagaggatcacagagttctgccaccgcttcctggagggcaaaatcaagccccacctgatgagccaggagctgccggaggactgggacaagcagcctgtcaaggtgcttgttgggaagaactttgaagacgtggcttttgatgagaaaaaaaacgtctttgtggagttctatgccccatggtgtggtcactgcaaacagttggctcccatttgggataaactgggagagacgtacaaggaccatgagaacatcgtcatcgccaagatggactcgactgccaacgaggtggaggccgtcaaagtgcacagcttccccacactcaagttctttcctgccagtgccgacaggacggtcattgattacaacggggaacgcacgctggatggttttaagaaattcctggagagcggtggccaggatggggcaggggatgatgacgatctcgaggacctggaagaagcagaggagccagacatggaggaagacgatgatcagaaagctgtgaaagatgaactgtaatacgcaaagccagacccgggcgctgccgagacccctcgggggctgcacacccagcagcagcgcacgcctccgaagcctgcggcctcgcttgaaggagggcgtcgccggaaacccagggaacctctctgaagtgacacctcacccctacacaccgtccgttcacccccgtctcttccttctgcttttcggtttttggaaagggatccatctccaggcagcccaccctggtggggcttgtttcctgaaaccatgatgtactttttcatacatgagtctgtccagagtgcttgctaccgtgttcggagtctcgctgcctccctcccgcgggaggtttctcctctttttgaaaattccgtctgtgggatttttagacatttttcgacatcaggggtgtcccccatgcctggaagaggagctggtggctgccagccctggggcccggcacaggcctgggccttccccttccctcaagccagggctcctcctcctgtcgtgggctcattgtgaccactggcctctctacagcacggcctgtggcctgttcaaggcagaaccacgacccttgactcccgggtggggaggtggccaaggatgctggagctgaatcagacgctgacagttcttcaggcatttctatttcacaatcgaattgaacacattggccaaataaagttgaaattttaccacc

SEQ ID NO: 469 - DNA, 1806 bp, Homo sapiens
tgagagtcctctagacaggcgctcctcgcagcaccgtagtgcgcttgcgctgagcagcccgcgagggcggaagtgggagctgcgaccgcgctccctgtgaggtgggcaagcggcgaaatggcgccctccgggagtcttgcagttcccctggcagtcctggtgctgttgctttggggtgctccctggacgcacgggcggcggagcaacgttcgcgtcatcacggacgagaactggagagaactgctggaaggagactggatgatagaattttatgccccgtggtgccctgcttgtcaaaatcttcaaccggaatgggaaagttttgctgaatggggagaagatcttgaggttaatattgcgaaagtagatgtcacagagcagccaggactgagtggacggtttatcataactgctcttcctactatttatcattgtaaagatggtgaatttaggcgctatcagggtccaaggactaagaaggacttcataaactttataagtgataaagagtggaagagtattgagcccgtttcatcatggtttggtccaggttctgttctgatgagtagtatgtcagcactctttcagctatctatgtggatcaggacttgccataactactttattgaagaccttggattgccagtgtggggatcatatactgtttttgctttagcaactctgttttccggactgttattaggactctgtatgatatttgtggcagattgcctttgtccttcaaaaaggcgcagaccacagccatacccatacccttcaaaaaaattattatcagaatctgcacaacctttgaaaaaagtggaggaggaacaagaggcggatgaagaagatgtttcagaagaagaagctgaaagtaaagaaggaacaaacaaagactttccacagaatgccataagacaacgctctctgggtccatcattggccacagataaatcctagttaaagagtctacattcagaacataaaagcactaggtatacaagtttgaaatatgatttaagcacagtatgatggtttaaatagttctctaatttttgaaaaatcgtgccaagcaataagatttatgtatatttgtttaataataacctatttcaagtctgagttttgaaaatttacatttcccaagtattgcattattgaggtatttaagaagattattttagagaaaaatatttctcatttgatataatttttctctgtttcactgtgtgaaaaaaagaagatatttcccataaatgggaagtttgcccattgtctcaagaaatgtgtatttcagtgacaatttcgtggtctttttagaggtatattccaaaatttccttgtatttttaggttatgcaactaataaaaactaccttacattaattaattacagttttctacacatggtaatacaggatatgctactgatttaggaagtttttaagttcatggtattctcttgattccaacaaagtttgattttctcttgtatttttcttacttactatgggttacattttttatttttcaaattggatgataatttcttggaaacattttttatgttttagtaaacagtatttttttgttgtttcaaactgaagtttactgagagatccatcaaattgaacaatctgttgtaatttaaaattttggccacttttttcagattttacatcattcttgctgaacttcaacttgaaattgtttttttttttttttctttttggatgtgaaggtgaacattcctgatttttgtctgatgtgaaaaagccttggtattttacattttgaaaattcaaag

SEQ ID NO: 470 - DNA, 2140 bp, Homo sapiens
tgagagtcctctagacaggcgctcctcgcagcaccgtagtgcgcttgcgctgagcagcccgcgagggcggaagtgggagctgcgaccgcgctccctgtgaggtgggcaagcggcgaaatggcgccctccgggagtcttgcagttcccctggcagtcctggtgctgttgctttggggtgctccctggacgcacgggcggcggagcaacgttcgcgtcatcacggacgagaactggagagaactgctggaaggagactggatgatagaattttatgccccgtggtgccctgcttgtcaaaatcttcaaccggaatgggaaagttttgctgaatggggagaagatcttgaggttaatattgcgaaagtagatgtcacagagcagccaggactgagtggacggtttatcataactgctcttcctactatttatcattgtaaagatggtgaatttaggcgctatcagggtccaaggactaagaaggacttcataaactttataagtgataaagagtggaagagtattgagcccgtttcatcatggtttggtccaggttctgttctgatgagtagtatgtcagcactctttcagctatctatgtggatcaggacttgccataactactttattgaagaccttggattgccagtgtggggatcatatactgtttttgctttagcaactctgttttccggactgttattaggactctgtatgatatttgtggcagattgcctttgtccttcaaaaaggcgcagaccacagccatacccatacccttcaaaaaaattattatcagaatctgcacaacctttgaaaaaagtggaggaggaacaagaggcggatgaagaagatgtttcagaagaagaagctgaaagtaaagaaggaacaaacaaagactttccacagaatgccataagacaacgctctctgggtccatcattggccacagataaatcctagttaaattttatagttatcttaatattatgattttgataaaaacagaagattgatcattttgtttggtttgaagtgaactgtgacttttttgaatattgcagggttcagtctagattgtcattaaattgaagagtctacattcagaacataaaagcactaggtatacaagtttgaaatatgatttaagcacagtatgatggtttaaatagttctctaatttttgaaaaatcgtgccaagcaataagatttatgtatatttgtttaataataacctatttcaagtctgagttttgaaaatttacatttcccaagtattgcattattgaggtatttaagaagattattttagagaaaaatatttctcatttgatataatttttctctgtttcactgtgtgaaaaaaagaagatatttcccataaatgggaagtttgcccattgtctcaagaaatgtgtatttcagtgacaatttcgtggtctttttagaggtatattccaaaatttccttgtatttttaggttatgcaactaataaaaactaccttacattaattaattacagttttctacacatggtaatacaggatatgctactgatttaggaagtttttaagttcatggtattctcttgattccaacaaagtttgattttctcttgtatttttcttacttactatgggttacattttttatttttcaaattggatgataatttcttggaaacattttttatgttttagtaaacagtatttttttgttgtttcaaactgaagtttactgagagatccatcaaattgaacaatctgttgtaatttaaaattttggccacttttttcagattttacatcattcttgctgaacttcaacttgaaattgtttttttttttttttctttttggatgtgaaggtgaacattcctgatttttgtctgatgtgaaaaagccttggtattttacattttgaaaattcaaagaagcttaatataaaagtttgcattctactcaggaaaaagcatcttcttgtatatgtcttaaatgtatttttgtcctcatatacagaaagttcttaattgattttacagtctgtaatgcttgatgttttaaaataataacatttttatattttttaaaagacaaacttcatattatcctgtgttctttcctgactggtaatattgtgtgg

SEQ ID NO: 471 - DNA, 9589 bp, Homo sapiens
ccgaccaacaccaacacccagctccgacgcagctcctctgcgcccttgccgccctccgagccacagctttcctcccgctcctgcccccggcccgtcgccgtctccgcgctcgcagcggcctcgggagggcccaggtagcgagcagcgacctcgcgagccttccgcactcccgcccggttccccggccgtccgcctatccttggccccctccgctttctccgcgccggcccgcctcgcttatgcctcggcgctgagccgctctcccgattgcccgccgacatgagctgcaacggaggctcccacccgcggatcaacactctgggccgcatgatccgcgccgagtctggcccggacctgcgctacgaggtgaccagcggcggcgggggcaccagcaggatgtactattctcggcgcggcgtgatcaccgaccagaactcggacggctactgtcaaaccggcacgatgtccaggcaccagaaccagaacaccatccaggagctgctgcagaactgctccgactgcttgatgcgagcagagctcatcgtgcagcctgaattgaagtatggagatggaatacaactgactcggagtcgagaattggatgagtgttttgcccaggccaatgaccaaatggaaatcctcgacagcttgatcagagagatgcggcagatgggccagccctgtgatgcttaccagaaaaggcttcttcagctccaagagcaaatgcgagccctttataaagccatcagtgtccctcgagtccgcagggccagctccaagggtggtggaggctacacttgtcagagtggctctggctgggatgagttcaccaaacatgtcaccagtgaatgtttggggtggatgaggcagcaaagggcggagatggacatggtggcctggggtgtggacctggcctcagtggagcagcacattaacagccaccggggcatccacaactccatcggcgactatcgctggcagctggacaaaatcaaagccgacctgcgcgagaaatctgcgatctaccagttggaggaggagtatgaaaacctgctgaaagcgtcctttgagaggatggatcacctgcgacagctgcagaacatcattcaggccacgtccagggagatcatgtggatcaatgactgcgaggaggaggagctgctgtacgactggagcgacaagaacaccaacatcgctcagaaacaggaggccttctccatacgcatgagtcaactggaagttaaagaaaaagagctcaataagctgaaacaagaaagtgaccaacttgtcctcaatcagcatccagcttcagacaaaattgaggcctatatggacactctgcagacgcagtggagttggattcttcagatcaccaagtgcattgatgttcatctgaaagaaaatgctgcctactttcagttttttgaagaggcgcagtctactgaagcatacctgaaggggctccaggactccatcaggaagaagtacccctgcgacaagaacatgcccctgcagcacctgctggaacagatcaaggagctggagaaagaacgagagaaaatccttgaatacaagcgtcaggtgcagaacttggtaaacaagtctaagaagattgtacagctgaagcctcgtaacccagactacagaagcaataaacccattattctcagagctctctgtgactacaaacaagatcagaaaatcgtgcataagggggatgagtgtatcctgaaggacaacaacgagcgcagcaagtggtacgtgacgggcccgggaggcgttgacatgcttgttccctctgtggggctgatcatccctcctccgaacccactggccgtggacctctcttgcaagattgagcagtactacgaagccatcttggctctgtggaaccagctctacatcaacatgaagagcctggtgtcctggcactactgcatgattgacatagagaagatcagggccatgacaatcgccaagctgaaaacaatgcggcaggaagattacatgaagacgatagccgaccttgagttacattaccaagagttcatcagaaatagccaaggctcagagatgtttggagatgatgacaagcggaaaatacagtctcagttcaccgatgcccagaagcattaccagaccctggtcattcagctccctggctatccccagcaccagacagtgaccacaactgaaatcactcatcatggaacctgccaagatgtcaaccataataaagtaattgaaaccaacagagaaaatgacaagcaagaaacatggatgctgatggagctgcagaagattcgcaggcagatagagcactgcgagggcaggatgactctcaaaaacctccctctagcagaccagggatcttctcaccacatcacagtgaaaattaacgagcttaagagtgtgcagaatgattcacaagcaattgctgaggttctcaaccagcttaaagatatgcttgccaacttcagaggttctgaaaagtactgctatttacagaatgaagtatttggactatttcagaaactggaaaatatcaatggtgttacagatggctacttaaatagcttatgcacagtaagggcactgctccaggctattctccaaacagaagacatgttaaaggtttatgaagccaggctcactgaggaggaaactgtctgcctggacctggataaagtggaagcttaccgctgtggactgaagaaaataaaaaatgacttgaacttgaagaagtcgttgttggccactatgaagacagaactacagaaagcccagcagatccactctcagacttcacagcagtatccactttatgatctggacttgggcaagttcggtgaaaaagtcacacagctgacagaccgctggcaaaggatagataaacagatcgactttagattatgggacctggagaaacaaatcaagcaattgaggaattatcgtgataactatcaggctttctgcaagtggctctatgatgctaaacgccgccaggattccttagaatccatgaaatttggagattccaacacagtcatgcggtttttgaatgagcagaagaacttgcacagtgaaatatctggcaaacgagacaaatcagaggaagtacaaaaaattgctgaactttgcgccaattcaattaaggattatgagctccagctggcctcatacacctcaggactggaaactctgctgaacatacctatcaagaggaccatgattcagtccccttctggggtgattctgcaagaggctgcagatgttcatgctcggtacattgaactacttacaagatctggagactattacaggttcttaagtgagatgctgaagagtttggaagatctgaagctgaaaaataccaagatcgaagttttggaagaggagctcagactggcccgagatgccaactcggaaaactgtaataagaacaaattcctggatcagaacctgcagaaataccaggcagagtgttcccagttcaaagcgaagcttgcgagcctggaggagctgaagagacaggctgagctggatgggaagtcggctaagcaaaatctagacaagtgctacggccaaataaaagaactcaatgagaagatcacccgactgacttatgagattgaagatgaaaagagaagaagaaaatctgtggaagacagatttgaccaacagaagaatgactatgaccaactgcagaaagcaaggcaatgtgaaaaggagaaccttggttggcagaaattagagtctgagaaagccatcaaggagaaggagtacgagattgaaaggttgagggttctactgcaggaagaaggcacccggaagagagaatatgaaaatgagctggcaaaggtaagaaaccactataatgaggagatgagtaatttaaggaacaagtatgaaacagagattaacattacgaagaccaccatcaaggagatatccatgcaaaaagaggatgattccaaaaatcttagaaaccagcttgatagactttcaagggaaaatcgagatctgaaggatgaaattgtcaggctcaatgacagcatcttgcaggccactgagcagcgaaggcgagctgaagaaaacgcccttcagcaaaaggcctgtggctctgagataatgcagaagaagcagcatctggagatagaactgaagcaggtcatgcagcagcgctctgaggacaatgcccggcacaagcagtccctggaggaggctgccaagaccattcaggacaaaaataaggagatcgagagactcaaagctgagtttcaggaggaggccaagcgccgctgggaatatgaaaatgaactgagtaaggtaagaaacaattatgatgaggagatcattagcttaaaaaatcagtttgagaccgagatcaacatcaccaagaccaccatccaccagctcaccatgcagaaggaagaggataccagtggctaccgggctcagatagacaatctcacccgagaaaacaggagcttatctgaagaaataaagaggctgaagaacactctaacccagaccacagagaatctcaggagggtggaagaagacatccaacagcaaaaggccactggctctgaggtgtctcagaggaaacagcagctggaggttgagctgagacaagtcactcagatgcgaacagaggagagcgtaagatataagcaatctcttgatgatgctgccaaaaccatccaggataaaaacaaggagatagaaaggttaaaacaactgatcgacaaagaaacaaatgaccggaaatgcctggaagatgaaaacgcgagattacaaagggtccagtatgacctgcagaaagcaaacagtagtgcgacggagacaataaacaaactgaaggttcaggagcaagaactgacacgcctgaggatcgactatgaaagggtttcccaggagaggactgtgaaggaccaggatatcacgcggttccagaactctctgaaagagctgcagctgcagaagcagaaggtggaagaggagctgaatcggctgaagaggaccgcgtcagaagactcctgcaagaggaagaagctggaggaagagctggaaggcatgaggaggtcgctgaaggagcaagccatcaaaatcaccaacctgacccagcagctggagcaggcatccattgttaagaagaggagtgaggatgacctccggcagcagagggacgtgctggatggccacctgagggaaaagcagaggacccaggaagagctgaggaggctctcttctgaggtcgaggccctgaggcggcagttactccaggaacaggaaagtgtcaaacaagctcacttgaggaatgagcatttccagaaggcgatagaagataaaagcagaagcttaaatgaaagcaaaatagaaattgagaggctgcagtctctcacagagaacctgaccaaggagcacttgatgttagaagaagaactgcggaacctgaggctggagtacgatgacctgaggagaggacgaagcgaagcggacagtgataaaaatgcaaccatcttggaactaaggagccagctgcagatcagcaacaaccggaccctggaactgcaggggctgattaatgatttacagagagagagggaaaatttgagacaggaaattgagaaattccaaaagcaggctttagaggcatctaataggattcaggaatcaaagaatcagtgtactcaggtggtacaggaaagagagagccttctggtgaaaatcaaagtcctggagcaagacaaggcaaggctgcagaggctggaggatgagctgaatcgtgcaaaatcaactctagaggcagaaaccagggtgaaacagcgcctggagtgtgagaaacagcaaattcagaatgacctgaatcagtggaagactcaatattcccgcaaggaggaggctattaggaagatagaatcggaaagagaaaagagtgagagagagaagaacagtcttaggagtgagatcgaaagactccaagcagagatcaagagaattgaagagaggtgcaggcgtaagctggaggattctaccagggagacacagtcacagttagaaacagaacgctcccgatatcagagggagattgataaactcagacagcgcccatatgggtcccatcgagagacccagactgagtgtgagtggaccgttgacacctccaagctggtgtttgatgggctgaggaagaaggtgacagcaatgcagctctatgagtgtcagctgatcgacaaaacaaccttggacaaactattgaaggggaagaagtcagtggaagaagttgcttctgaaatccagccattccttcggggtgcaggatctatcgctggagcatctgcttctcctaaggaaaaatactctttggtagaggccaagagaaagaaattaatcagcccagaatccacagtcatgcttctggaggcccaggcagctacaggtggtataattgatccccatcggaatgagaagctgactgtcgacagtgccatagctcgggacctcattgacttcgatgaccgtcagcagatatatgcagcagaaaaagctatcactggttttgatgatccattttcaggcaagacagtatctgtttcagaagccatcaagaaaaatttgattgatagagaaaccggaatgcgcctgctggaagcccagattgcttcagggggtgtagtagaccctgtgaacagtgtctttttgccaaaagatgtcgccttggcccgggggctgattgatagagatttgtatcgatccctgaatgatccccgagatagtcagaaaaactttgtggatccagtcaccaaaaagaaggtcagttacgtgcagctgaaggaacggtgcagaatcgaaccacatactggtctgctcttgctttcagtacagaagagaagcatgtccttccaaggaatcagacaacctgtgaccgtcactgagctagtagattctggtatattgagaccgtccactgtcaatgaactggaatctggtcagatttcttatgacgaggttggtgagagaattaaggacttcctccagggttcaagctgcatagcaggcatatacaatgagaccacaaaacagaagcttggcatttatgaggccatgaaaattggcttagtccgacctggtactgctctggagttgctggaagcccaagcagctactggctttatagtggatcctgttagcaacttgaggttaccagtggaggaagcctacaagagaggtctggtgggcattgagttcaaagagaagctcctgtctgcagaacgagctgtcactgggtataatgatcctgaaacaggaaacatcatctctttgttccaagccatgaataaggaactcatcgaaaagggccacggtattcgcttattagaagcacagatcgcaaccggggggatcattgacccaaaggagagccatcgtttaccagttgacatagcatataagaggggctatttcaatgaggaactcagtgagattctctcagatccaagtgatgataccaaaggattttttgaccccaacactgaagaaaatcttacctatctgcaactaaaagaaagatgcattaaggatgaggaaacagggctctgtcttctgcctctgaaagaaaagaagaaacaggtgcagacatcacaaaagaataccctcaggaagcgtagagtggtcatagttgacccagaaaccaataaagaaatgtctgttcaggaggcctacaagaagggcctaattgattatgaaaccttcaaagaactgtgtgagcaggaatgtgaatgggaagaaataaccatcacgggatcagatggctccaccagggtggtcctggtagatagaaagacaggcagtcagtatgatattcaagatgctattgacaagggccttgttgacaggaagttctttgatcagtaccgatccggcagcctcagcctcactcaatttgctgacatgatctccttgaaaaatggtgtcggcaccagcagcagcatgggcagtggtgtcagcgatgatgtttttagcagctcccgacatgaatcagtaagtaagatttccaccatatccagcgtcaggaatttaaccataaggagcagctctttttcagacaccctggaagaatcgagccccattgcagccatctttgacacagaaaacctggagaaaatctccattacagaaggtatagagcggggcatcgttgacagcatcacgggtcagaggcttctggaggctcaggcctgcacaggtggcatcatccacccaaccacgggccagaagctgtcacttcaggacgcagtctcccagggtgtgattgaccaagacatggccaccaggctgaagcctgctcagaaagccttcataggcttcgagggtgtgaagggaaagaagaagatgtcagcagcagaggcagtgaaagaaaaatggctcccgtatgaggctggccagcgcttcctggagttccagtacctcacgggaggtcttgttgacccggaagtgcatgggaggataagcaccgaagaagccatccggaaggggttcatagatggccgcgccgcacagaggctgcaagacaccagcagctatgccaaaatcctgacctgccccaaaaccaaattaaaaatatcctataaggatgccataaatcgctccatggtagaagatatcactgggctgcgccttctggaagccgcctccgtgtcgtccaagggcttacccagcccttacaacatgtcttcggctccgggctcccgctccggctcccgctcgggatctcgctccggatctcgctccgggtcccgcagtgggtcccggagaggaagctttgacgccacagggaattcttcctactcttattcctactcatttagcagtagttctattgggcactagtagtcagttgggagtggttgctataccttgacttcatttatatgaatttccactttattaaataatagaaaagaaaatcccggtgcttgcagtagagtgataggacattctatgcttacagaaaatatagccatgattgaaatcaaatagtaaaggctgttctggctttttatcttcttagctcatcttaaataagcagtacacttggatgcagtgcgtctgaagtgctaatcagttgtaacaatagcacaaatcgaacttaggatttgtttcttctcttctgtgtttcgatttttgatcaattctttaattttggaagcctataatacagttttctattcttggagataaaaattaaatggatcactgatattttagtcattctgcttctcatctaaatatttccatattctgtattaggagaaaattaccctcccagcaccagcccccctctcaaacccccaacccaaaaccaagcattttggaatgagtctcctttagtttcagagtgtggattgtataacccatatactcttcgatgtacttgtttggtttggtattaatttgactgtgcatgacagcggcaatcttttctttggtcaaagttttctgtttattttgcttgtcatattcgatgtactttaaggtgtctttatgaagtttgctattctggcaataaacttttagacttttg

SEQ ID NO: 472 - DNA, 9588 bp, Homo sapiens
ccgaccaacaccaacacccagctccgacgcagctcctctgcgcccttgccgccctccgagccacagctttcctcccgctcctgcccccggcccgtcgccgtctccgcgctcgcagcggcctcgggagggcccaggtagcgagcagcgacctcgcgagccttccgcactcccgcccggttccccggccgtccgcctatccttggccccctccgctttctccgcgccggcccgcctcgcttatgcctcggcgctgagccgctctcccgattgcccgccgacatgagctgcaacggaggctcccacccgcggatcaacactctgggccgcatgatccgcgccgagtctggcccggacctgcgctacgaggtgaccagcggcggcgggggcaccagcaggatgtactattctcggcgcggcgtgatcaccgaccagaactcggacggctactgtcaaaccggcacgatgtccaggcaccagaaccagaacaccatccaggagctgctgcagaactgctccgactgcttgatgcgagcagagctcatcgtgcagcctgaattgaagtatggagatggaatacaactgactcggagtcgagaattggatgagtgttttgcccaggccaatgaccaaatggaaatcctcgacagcttgatcagagagatgcggcagatgggccagccctgtgatgcttaccagaaaaggcttcttcagctccaagagcaaatgcgagccctttataaagccatcagtgtccctcgagtccgcagggccagctccaagggtggtggaggctacacttgtcagagtggctctggctgggatgagttcaccaaacatgtcaccagtgaatgtttggggtggatgaggcagcaaagggcggagatggacatggtggcctggggtgtggacctggcctcagtggagcagcacattaacagccaccggggcatccacaactccatcggcgactatcgctggcagctggacaaaatcaaagccgacctgcgcgagaaatctgcgatctaccagttggaggaggagtatgaaaacctgctgaaagcgtcctttgagaggatggatcacctgcgacagctgcagaacatcattcaggccacgtccagggagatcatgtggatcaatgactgcgaggaggaggagctgctgtacgactggagcgacaagaacaccaacatcgctcagaaacaggaggccttctccatacgcatgagtcaactggaagttaaagaaaaagagctcaataagctgaaacaagaaagtgaccaacttgtcctcaatcagcatccagcttcagacaaaattgaggcctatatggacactctgcagacgcagtggagttggattcttcagatcaccaagtgcattgatgttcatctgaaagaaaatgctgcctactttcagttttttgaagaggcgcagtctactgaagcatacctgaaggggctccaggactccatcaggaagaagtacccctgcgacaagaacatgcccctgcagcacctgctggaacagatcaaggagctggagaaagaacgagagaaaatccttgaatacaagcgtcaggtgcagaacttggtaaacaagtctaagaagattgtacagctgaagcctcgtaacccagactacagaagcaataaacccattattctcagagctctctgtgactacaaacaagatcagaaaatcgtgcataagggggatgagtgtatcctgaaggacaacaacgagcgcagcaagtggtacgtgacgggcccgggaggcgttgacatgcttgttccctctgtggggctgatcatccctcctccgaacccactggccgtggacctctcttgcaagattgagcagtactacgaagccatcttggctctgtggaaccagctctacatcaacatgaagagcctggtgtcctggcactactgcatgattgacatagagaagatcagggccatgacaatcgccaagctgaaaacaatgcggcaggaagattacatgaagacgatagccgaccttgagttacattaccaagagttcatcagaaatagccaaggctcagagatgtttggagatgatgacaagcggaaaatacagtctcagttcaccgatgcccagaagcattaccagaccctggtcattcagctccctggctatccccagcaccagacagtgaccacaactgaaatcactcatcatggaacctgccaagatgtcaaccataataaagtaattgaaaccaacagagaaaatgacaagcaagaaacatggatgctgatggagctgcagaagattcgcaggcagatagagcactgcgagggcaggatgactctcaaaaacctccctctagcagaccaggggtcttctcaccacatcacagtgaaaattaacgagcttaagagtgtgcagaatgattcacaagcaattgctgaggttctcaaccagcttaaagatatgcttgccaacttcagaggttctgaaaagtactgctatttacagaatgaagtatttggactatttcagaaactggaaaatatcaatggtgttacagatggctacttaaatagcttatgcacagtaagggcactgctccaggctattctccaaacagaagacatgttaaaggtttatgaagccaggctcactgaggaggaaactgtctgcctggacctggataaagtggaagcttaccgctgtggactgaagaaaataaaaaatgacttgaacttgaagaagtcgttgttggccactatgaagacagaactacagaaagcccagcagatccactctcagacttcacagcagtatccactttatgatctggacttgggcaagttcggtgaaaaagtcacacagctgacagaccgctggcaaaggatagataaacagatcgactttagattatgggacctggagaaacaaatcaagcaattgaggaattatcgtgataactatcaggctttctgcaagtggctctatgatcgtaaacgccgccaggattccttagaatccatgaaatttggagattccaacacagtcatgcggtttttgaatgagcagaagaacttgcacagtgaaatatctggcaaacgagacaaatcagaggaagtacaaaaaattgctgaactttgcgccaattcaattaaggattatgagctccagctggcctcatacacctcaggactggaaactctgctgaacatacctatcaagaggaccatgattcagtccccttctggggtgattctgcaagaggctgcagatgttcatgctcggtacattgaactacttacaagatctggagactattacaggttcttaagtgagatgctgaagagtttggaagatctgaagctgaaaaataccaagatcgaagttttggaagaggagctcagactggcccgagatgccaactcggaaaactgtaataagaacaaattcctggatcagaacctgcagaaataccaggcagagtgttcccagttcaaagcgaagcttgcgagcctggaggagctgaagagacaggctgagctggatgggaagtcggctaagcaaaatctagacaagtgctacggccaaataaaagaactcaatgagaagatcacccgactgacttatgagattgaagatgaaaagagaagaagaaaatctgtggaagacagatttgaccaacagaagaatgactatgaccaactgcagaaagcaaggcaatgtgaaaaggagaaccttggttggcagaaattagagtctgagaaagccatcaaggagaaggagtacgagattgaaaggttgagggttctactgcaggaagaaggcacccggaagagagaatatgaaaatgagctggcaaaggtaagaaaccactataatgaggagatgagtaatttaaggaacaagtatgaaacagagattaacattacgaagaccaccatcaaggagatatccatgcaaaaagaggatgattccaaaaatcttagaaaccagcttgatagactttcaagggaaaatcgagatctgaaggatgaaattgtcaggctcaatgacagcatcttgcaggccactgagcagcgaaggcgagctgaagaaaacgcccttcagcaaaaggcctgtggctctgagataatgcagaagaagcagcatctggagatagaactgaagcaggtcatgcagcagcgctctgaggacaatgcccggcacaagcagtccctggaggaggctgccaagaccattcaggacaaaaataaggagatcgagagactcaaagctgagtttcaggaggaggccaagcgccgctgggaatatgaaaatgaactgagtaaggtaagaaacaattatgatgaggagatcattagcttaaaaaatcagtttgagaccgagatcaacatcaccaagaccaccatccaccagctcaccatgcagaaggaagaggataccagtggctaccgggctcagatagacaatctcacccgagaaaacaggagcttatctgaagaaataaagaggctgaagaacactctaacccagaccacagagaatctcaggagggtggaagaagacatccaacagcaaaaggccactggctctgaggtgtctcagaggaaacagcagctggaggttgagctgagacaagtcactcagatgcgaacagaggagagcgtaagatataagcaatctcttgatgatgctgccaaaaccatccaggataaaaacaaggagatagaaaggttaaaacaactgatcgacaaagaaacaaatgaccggaaatgcctggaagatgaaaacgcgagattacaaagggtccagtatgacctgcagaaagcaaacagtagtgcgacggagacaataaacaaactgaaggttcaggagcaagaactgacacgcctgaggatcgactatgaaagggtttcccaggagaggactgtgaaggaccaggatatcacgcggttccagaactctctgaaagagctgcagctgcagaagcagaaggtggaagaggagctgaatcggctgaagaggaccgcgtcagaagactcctgcaagaggaagaagctggaggaagagctggaaggcatgaggaggtcgctgaaggagcaagccatcaaaatcaccaacctgacccagcagctggagcaggcatccattgttaagaagaggagtgaggatgacctccggcagcagagggacgtgctggatggccacctgagggaaaagcagaggacccaggaagagctgaggaggctctcttctgaggtcgaggccctgaggcggcagttactccaggaacaggaaagtgtcaaacaagctcacttgaggaatgagcatttccagaaggcgatagaagataaaagcagaagcttaaatgaaagcaaaatagaaattgagaggctgcagtctctcacagagaacctgaccaaggagcacttgatgttagaagaagaactgcggaacctgaggctggagtacgatgacctgaggagaggacgaagcgaagcggacagtgataaaaatgcaaccatcttggaactaaggagccagctgcagatcagcaacaaccggaccctggaactgcaggggctgattaatgatttacagagagagagggaaaatttgagacaggaaattgagaaattccaaaagcaggctttagaggcatctaataggattcaggaatcaaagaatcagtgtactcaggtggtacaggaaagagagagccttctggtgaaaatcaaagtcctggagcaagacaaggcaaggctgcagaggctggaggatgagctgaatcgtgcaaaatcaactctagaggcagaaaccagggtgaaacagcgcctggagtgtgagaaacagcaaattcagaatgacctgaatcagtggaagactcaatattcccgcaaggaggaggctattaggaagatagaatcggaaagagaaaagagtgagagagagaagaacagtcttaggagtgagatcgaaagactccaagcagagatcaagagaattgaagagaggtgcaggcgtaagctggaggattctaccagggagacacagtcacagttagaaacagaacgctcccgatatcagagggagattgataaactcagacagcgcccatatgggtcccatcgagagacccagactgagtgtgagtggaccgttgacacctccaagctggtgtttgatgggctgaggaagaaggtgacagcaatgcagctctatgagtgtcagctgatcgacaaaacaaccttggacaaactattgaaggggaagaagtcagtggaagaagttgcttctgaaatccagccattccttcggggtgcaggatctatcgctggagcatctgcttctcctaaggaaaaatactctttggtagaggccaagagaaagaaattaatcagcccagaatccacagtcatgcttctggaggcccaggcagctacaggtggtataattgatccccatcggaatgagaagctgactgtcgacagtgccatagctcgggacctcattgacttcgatgaccgtcagcagatatatgcagcagaaaaagctatcactggttttgatgatccattttcaggcaagacagtatctgtttcagaagccatcaagaaaaatttgattgatagagaaaccggaatgcgcctgctggaagcccagattgcttcagggggtgtagtagaccctgtgaacagtgtctttttgccaaaagatgtcgccttggcccgggggctgattgatagagatttgtatcgatccctgaatgatccccgagatagtcagaaaaactttgtggatccagtcaccaaaaagaaggtcagttacgtgcagctgaaggaacggtgcagaatcgaaccacatactggtctgctcttgctttcagtacagaagagaagcatgtccttccaaggaatcagacaacctgtgaccgtcactgagctagtagattctggtatattgagaccgtccactgtcaatgaactggaatctggtcagatttcttatgacgaggttggtgagagaattaaggacttcctccagggttcaagctgcatagcaggcatatacaatgagaccacaaaacagaagcttggcatttatgaggccatgaaaattggcttagtccgacctggtactgctctggagttgctggaagcccaagcagctactggctttatagtggatcctgttagcaacttgaggttaccagtggaggaagcctacaagagaggtctggtgggcattgagttcaaagagaagctcctgtctgcagaacgagctgtcactgggtataatgatcctgaaacaggaaacatcatctctttgttccaagccatgaataaggaactcatcgaaaagggccacggtattcgcttattagaagcacagatcgcaaccggggggatcattgacccaaaggagagccatcgtttaccagttgacatagcatataagaggggctatttcaatgaggaactcagtgagattctctcagatccaagtgatgataccaaaggattttttgaccccaacactgaagaaaatcttacctatctgcaactaaaagaaagatgcattaaggatgaggaaacagggctctgtcttctgcctctgaaagaaaagaagaaacaggtgcagacatcacaaaagaataccctcaggaagcgtagagtggtcatagttgacccagaaaccaataaagaaatgtctgttcaggaggcctacaagaagggcctaattgattatgaaaccttcaaagaactgtgtgagcaggaatgtgaatgggaagaaataaccatcacgggatcagatggctccaccagggtggtcctggtagatagaaagacaggcagtcagtatgatattcaagatgctattgacaagggccttgttgacaggaagttctttgatcagtaccgatccggcagcctcagcctcactcaatttgctgacatgatctccttgaaaaatggtgtcggcaccagcagcagcatgggcagtggtgtcagcgatgatgtttttagcagctcccgacatgaatcagtaagtaagatttccaccatatccagcgtcaggaatttaaccataaggagcagctctttttcagacaccctggaagaatcgagccccattgcagccatctttgacacagaaaacctggagaaaatctccattacagaaggtatagagcggggcatcgttgacagcatcacgggtcagaggcttctggaggctcaggcctgcacaggtggcatcatccacccaaccacgggccagaagctgtcacttcaggacgcagtctcccagggtgtgattgaccaagacatggccaccagcgtgaagcctgctcagaaagccttcataggcttcgagggtgtgaagggaaagaagaagatgtcagcagcagaggcagtgaaagaaaaatggctcccgtatgaggctggccagcgcttcctggagttccagtacctcacgggaggtcttgttgacccggaagtgcatgggaggataagcaccgaagaagccatccggaaggggttcatagatggccgcgccgcacagaggctgcaagacaccagcagctatgccaaaatcctgacctgccccaaaaccaaattaaaaatatcctataaggatgccataaatcgctccatggtagaagatatcactgggctgcgccttctggaagccgcctccgtgtcgtccaagggcttacccagcccttacaacatgtcttcggctccggggtcccgctccggctcccgctcgggatctcgctccggatctcgctccgggtcccgcagtgggtcccggagaggaagctttgacgccacagggaattcttcctactcttattcctactcatttagcagtagttctattgggcactagtagtcagttgggagtggttgctataccttgacttcatttatatgaatttccactttattaaataatagaaaagaaaatcccggtgcttgcagtagagtgataggacattctatgcttacagaaaatatagccatgattgaaatcaaatagtaaaggctgttctggctttttatcttcttagctcatcttaaataagcagtacacttggatgcagtgcgtctgaagtgctaatcagttgtaacaatagcacaaatcgaacttaggatttgtttcttctcttctgtgtttcgatttttgatcaattctttaattttggaagcctataatacagttttctattcttggagataaaaattaaatggatcactgatattttagtcattctgcttctcatctaaatatttccatattctgtattaggagaaaattaccctcccagcaccagcccccctctcaaacccccaacccaaaaccaagcattttggaatgagtctcctttagtttcagagtgtggattgtataacccatatactcttcgatgtacttgtttggtttggtattaatttgactgtgcatgacagcggcaatcttttctttggtcaaagttttctgtttattttgcttgtcatattcgatgtactttaaggtgtctttatgaagtttgctattctggcaataaacttttagactttt

SEQ ID NO: 473 - DNA, 5480 bp, Homo sapiens
aggactactgagcccagccaggctgtatgccattgctgccaaagaaaaagatattcaagaggagtccactttttcttctaggaagatttccaatcagtttgattgggctctaatgagactagatctttctgttcgaagaactggccgcattccaaagaagcttctacaaaaagtttttaatgatacctgccgctcaggtggcctaggtggtagtcatgccttgcttctactacgtagttgtggttctctcttgcctgaactaaagcttgaagagagaacagaatttgctcataggatatgggacacacttcagaaattaggtgctgtgtatgatgtgagtcactataatgctttacttaaagtctatcttcaaaatgaatataaattctcaccaactgatttcctggcaaaaatggaggaagcaaacattcaaccaaatcgagtgacataccagagattgattgcttcttattgtaatgtaggagatattgaaggtgccagcaagattcttggatttatgaaaactaaggatctcccagttacagaggcagtattcagtgcccttgtgacagggcatgccagagctggtgatatggagaatgcagaaaacattctcacagtgatgagagatgccggaattgagcctggtccagacacatacctcgcattattgaatgcatatgctgagaagggcgacattgaccatgttaagcagactctggagaaggtggagaagtccgagcttcaccttatggaccgtgatttactgcaaattatttttagcttcagtaaagctgggtatcctcagtatgtctcagaaattttggaaaaagttacatgtgaaagaagatatattccagatgcaatgaacctcattttacttttagtcactgaaaaattggaagatgtagcgttgcaaattttactagcatgccccgtatcaaaggaagatggcccaagtgtctttggcagtttctttttacaacactgtgtgactatgaatacgcctgtggagaagctaacagactactgtaagaagttaaaggaagtccagatgcactcctttcctctgcagttcaccctccattgtgctttactcgccaataaaactgatttggcaaaagccttaatgaaggctgtgaaggaggaaggttttcctatcagacctcactatttctggccattgctagttggacgtcggaaggaaaaaaatgttcaaggtataattgaaatcctcaaaggaatgcaagaattgggagtacatcctgatcaggaaacatatacagattatgtgattccatgctttgatagtgtaaactcagcacgagccattttgcaggaaaatggatgtctgtctgatagtgatatgttttctcaagctggattgagaagtgaagcagcaaatgggaacttagactttgtattatcatttttgaaatcaaatacattgcccatctcgctgcagtctataagaagtagcctactgctaggcttcaggaggtctatgaatataaatctttggagcgagataacagaattgttgtacaaggatggacgttattgccaggagcctcgaggaccgacggaagctgttggctattttctttataacttgattgacagcatgagtgactcagaggtacaggccaaggaggagcatttgagacaatacttccatcagctggagaagatgaatgtaaaaattcctgaaaatatctacagaggcattcgtaatctcctggaaagctaccatgttcctgaattgattaaggatgctcacttgttggttgagagtaagaatttagactttcaaaaaactgtgcaacttacatcatctgaattggagtccacacttgaaacactaaaagctgaaaatcaacctataagagatgtcctaaagcaactcatattagtgctttgttcagaagagaatatgcaaaaagcccttgaattgaaagcaaaatatgaatccgacatggttactggtggctatgcagctttaataaatttatgctgtcgacatgataaagtagaagatgccttgaacttgaaagaagaatttgaccgcttagattcatctgctgtccttgacaccggcaagtatgtaggccttgtaagagtattggcaaagcatggcaagctccaagatgctattaacattctgaaggagatgaaagagaaggatgttcttatcaaagatacaacagccttgtcctttttccacatgctaaatggcgcagctttaagaggtgaaattgaaacagtaaaacagttgcatgaagccatcgtgactctagggttagcagaaccatccaccaacataagtttcccattggtcactgtacacttggaaaagggcgacctatctactgctcttgaggtcgccattgactgctatgaaaagtataaagtattaccaaggattcatgatgtcttgtgtaaactggtagagaaaggcgagactgatctaattcagaaagcaatggactttgtgagccaagaacaaggtgaaatggtgatgctctatgatctcttctttgccttcctacaaacaggaaattacaaagaggccaagaagatcattgagactccagggattagagctcgatctgcaaggcttcagtggttttgtgacagatgtgttgcaaataatcaggttgaaactctggaaaaattagtggagctgacacagaagctatttgaatgtgatagagaccagatgtactacaatctgctaaaactgtataaaataaacggtgactggcaaagagctgatgcagtctggaataaaatccaagaagaaaatgttattcctcgtgaaaagacattaagattattagcagaaatccttagagagggtaaccaggaagttccgtttgacgtacctgagttgtggtatgaagatgaaaaacattccctgaattcttcgtcagcctcaaccacagaacctgatttccagaaagatatattgattgcctgccgattgaaccaaaaaaaaggggcatatgatattttcctgaatgcaaaagagcaaaacattgtgtttaatgctgaaacctacagcaatctcattaaattactgatgtcagaagattattttacacaagcaatggaagtgaaagcattcgcggagacccacatcaagggcttcacactgaacgatgctgccaacagccgcctcatcataacgcaagttaggcgggattatttgaaagaggctgtgacaacactgaaaacagtattggatcagcagcagaccccttctaggttagcagtgacccgtgtcatccaggcattggccatgaagggtgatgttgaaaacatagaagtagttcagaagatgttaaatggactcgaagactccattggactttcaaaaatggttttcatcaataacattgctttggctcaaataaagaataataacatagatgccgcaatagaaaacattgaaaatatgcttacttcagagaataaagtcattgaaccccaatacttcggcttggcatacttattcagaaaagtaatagaggagcagttggaaccagcagttgaaaagataagcatcatggcggagagattggccaatcagtttgcaatttataaacctgtcactgattttttccttcaacttgtggatgcaggcaaggtggatgatgccagagctctcctacagagatgtggtgcaattgctgaacaaaccccgattttgttgttgttcctccttaggaattctaggaaacaaggaaaggcatcaactgtgaaatctgtgttagaattgattcctgaattaaatgaaaaggaagaagcatacaattccctcatgaaaagctatgtctcagagaaagatgtcacatctgctaaagcactgtatgaacatttgactgcaaagaatacaaaattggatgatctgtttctaaagcgttacgcatctttgctgaagtatgctggagagcctgtccctttcattgaaccccctgaaagctttgaattttatgcacagcagctaagaaaattgagggaaaactcttcttgaaataaccaggcgatactttgttttgtatatatttgtgattctgtgtctacatgttattttgaagtatatctgagggaaaaataaatgaaaattttctttatgtacttatgtatgtgtgatgcatgttcaaagtcttattgaccataactctgtgcacttggttattggacatttttggagtttttttctctgggaaaaatcgatagtgttttcttcaatgctgctgctgtgtgaagccatactttttcaggattcttcccctaattggctctttggtttccctgctctgtttcatttatttcattaaaatgttattcctttatttaagattcacttattagtctgctgtttctctgaaaaattttagagctaggtatagtgaccgtgaactttctaacgcataatattctgtgatacagccattccgtacatgtgtgaagtcctgcataactttcgaactttgttaaatgttggcactaggagtcatcagatctaggcttcatcattttccagtgagaagcagagacccaaagggcctgttacttgtgcttggtcaggggactgtctgtcatgcctggaggctcttcggcacacttccccatctttcccttctgccactgtggcttcaagcacctctgttcatagagcgtctctgaaattgagtctcggtcatgacttatcccgaagtagagcaatgtgtttcctctcattgtagtttcaggactttgtcagtacaagctctgccctaggcttgttactttatactcatatcctgaaaagatgtgatttcatctatgaaggggtaaaatattggtttgtatttaattgtttgaaataaaagtgatccctatattgaatctcatgcctgttaatatctacactgtaagtagtgacttcaaaaaaattctaagataggtagtcaggagagtttgccattataaaaggtgtcttaataatatggaatattgacctaactggagatgaggtaattaattaccgaaatgttgaaaatgttttgagaactctccccattttggggtattccttgttcatttgaatttggtgactccctactgttccagtttcagtgccaacttgggtcacactgttcacatcaggggagaccttgccttggggacgtaggcgggcctcttgcaacttgtgctgttgaccttctgtcttgtggaactctctctcctgcatctgctacctgcccgcagatggtgtgagggagggttgatggcgggaagccaggaagtagatgtcatcatggtattggccaggcttttacttcaactctttttgtggcgttagatttaaggaagcagggggcatggccaacgttgagtcttggcccagtggacatagtgcggctttcccttgagcactgcccagatgcaggacctgcacatgttacaggtttgccaaaagcatcttttttttt

SEQ ID NO: 474 - DNA, 5687 bp, Homo sapiens
acatgctcctcctgtccttctggcggagcgtgcttcccgctgcggggacgttcgagcaatggcagccctgctgagatccgcgcgttggttgctgcgtgccggggcggccccgcgcctcccgctctccctgcgcctcctccctggcggcccgggccggctgcatgccgcctcctatctgcccgccgctcgcgccgggcccgtggccggaggactactgagcccagccaggctgtatgccattgctgccaaagaaaaagatattcaagaggagtccactttttcttctaggaagatttccaatcagtttgattgggctctaatgagactagatctttctgttcgaagaactggccgcattccaaagaagcttctacaaaaagtttttaatgatacctgccgctcaggtggcctaggtggtagtcatgccttgcttctactacgtagttgtggttctctcttgcctgaactaaagcttgaagagagaacagaatttgctcataggatatgggacacacttcagaaattaggtgctgtgtatgatgtgagtcactataatgctttacttaaagtctatcttcaaaatgaatataaattctcaccaactgatttcctggcaaaaatggaggaagcaaacattcaaccaaatcgagtgacataccagagattgattgcttcttattgtaatgtaggagatattgaaggtgccagcaagattcttggatttatgaaaactaaggatctcccagttacagaggcagtattcagtgcccttgtgacagggcatgccagagctggtgatatggagaatgcagaaaacattctcacagtgatgagagatgccggaattgagcctggtccagacacatacctcgcattattgaatgcatatgctgagaagggcgacattgaccatgttaagcagactctggagaaggtggagaagtccgagcttcaccttatggaccgtgatttactgcaaattatttttagcttcagtaaagctgggtatcctcagtatgtctcagaaattttggaaaaagttacatgtgaaagaagatatattccagatgcaatgaacctcattttacttttagtcactgaaaaattggaagatgtagcgttgcaaattttactagcatgccccgtatcaaaggaagatggcccaagtgtctttggcagtttctttttacaacactgtgtgactatgaatacgcctgtggagaagctaacagactactgtaagaagttaaaggaagtccagatgcactcctttcctctgcagttcaccctccattgtgctttactcgccaataaaactgatttggcaaaagccttaatgaaggctgtgaaggaggaaggttttcctatcagacctcactatttctggccattgctagttggacgtcggaaggaaaaaaatgttcaaggtataattgaaatcctcaaaggaatgcaagaattgggagtacatcctgatcaggaaacatatacagattatgtgattccatgctttgatagtgtaaactcagcacgagccattttgcaggaaaatggatgtctgtctgatagtgatatgttttctcaagctggattgagaagtgaagcagcaaatgggaacttagactttgtattatcatttttgaaatcaaatacattgcccatctcgctgcagtctataagaagtagcctactgctaggcttcaggaggtctatgaatataaatctttggagcgagataacagaattgttgtacaaggatggacgttattgccaggagcctcgaggaccgacggaagctgttggctattttctttataacttgattgacagcatgagtgactcagaggtacaggccaaggaggagcatttgagacaatacttccatcagctggagaagatgaatgtaaaaattcctgaaaatatctacagaggcattcgtaatctcctggaaagctaccatgttcctgaattgattaaggatgctcacttgttggttgagagtaagaatttagactttcaaaaaactgtgcaacttacatcatctgaattggagtccacacttgaaacactaaaagctgaaaatcaacctataagagatgtcctaaagcaactcatattagtgctttgttcagaagagaatatgcaaaaagcccttgaattgaaagcaaaatatgaatccgacatggttactggtggctatgcagctttaataaatttatgctgtcgacatgataaagtagaagatgccttgaacttgaaagaagaatttgaccgcttagattcatctgctgtccttgacaccggcaagtatgtaggccttgtaagagtattggcaaagcatggcaagctccaagatgctattaacattctgaaggagatgaaagagaaggatgttcttatcaaagatacaacagccttgtcctttttccacatgctaaatggcgcagctttaagaggtgaaattgaaacagtaaaacagttgcatgaagccatcgtgactctagggttagcagaaccatccaccaacataagtttcccattggtcactgtacacttggaaaagggcgacctatctactgctcttgaggtcgccattgactgctatgaaaagtataaagtattaccaaggattcatgatgtcttgtgtaaactggtagagaaaggcgagactgatctaattcagaaagcaatggactttgtgagccaagaacaaggtgaaatggtgatgctctatgatctcttctttgccttcctacaaacaggaaattacaaagaggccaagaagatcattgagactccagggattagagctcgatctgcaaggcttcagtggttttgtgacagatgtgttgcaaataatcaggttgaaactctggaaaaattagtggagctgacacagaagctatttgaatgtgatagagaccagatgtactacaatctgctaaaactgtataaaataaacggtgactggcaaagagctgatgcagtctggaataaaatccaagaagaaaatgttattcctcgtgaaaagacattaagattattagcagaaatccttagagagggtaaccaggaagttccgtttgacgtacctgagttgtggtatgaagatgaaaaacattccctgaattcttcgtcagcctcaaccacagaacctgatttccagaaagatatattgattgcctgccgattgaaccaaaaaaaaggggcatatgatattttcctgaatgcaaaagagcaaaacattgtgtttaatgctgaaacctacagcaatctcattaaattactgatgtcagaagattattttacacaagcaatggaagtgaaagcattcgcggagacccacatcaagggcttcacactgaacgatgctgccaacagccgcctcatcataacgcaagttaggcgggattatttgaaagaggctgtgacaacactgaaaacagtattggatcagcagcagaccccttctaggttagcagtgacccgtgtcatccaggcattggccatgaagggtgatgttgaaaacatagaagtagttcagaagatgttaaatggactcgaagactccattggactttcaaaaatggttttcatcaataacattgctttggctcaaataaagaataataacatagatgccgcaatagaaaacattgaaaatatgcttacttcagagaataaagtcattgaaccccaatacttcggcttggcatacttattcagaaaagtaatagaggagcagttggaaccagcagttgaaaagataagcatcatggcggagagattggccaatcagtttgcaatttataaacctgtcactgattttttccttcaacttgtggatgcaggcaaggtggatgatgccagagctctcctacagagatgtggtgcaattgctgaacaaaccccgattttgttgttgttcctccttaggaattctaggaaacaaggaaaggcatcaactgtgaaatctgtgttagaattgattcctgaattaaatgaaaaggaagaagcatacaattccctcatgaaaagctatgtctcagagaaagatgtcacatctgctaaagcactgtatgaacatttgactgcaaagaatacaaaattggatgatctgtttctaaagcgttacgcatctttgctgaagtatgctggagagcctgtccctttcattgaaccccctgaaagctttgaattttatgcacagcagctaagaaaattgagggaaaactcttcttgaaataaccaggcgatactttgttttgtatatatttgtgattctgtgtctacatgttattttgaagtatatctgagggaaaaataaatgaaaattttctttatgtacttatgtatgtgtgatgcatgttcaaagtcttattgaccataactctgtgcacttggttattggacatttttggagtttttttctctgggaaaaatcgatagtgttttcttcaatgctgctgctgtgtgaagccatactttttcaggattcttcccctaattggctctttggtttccctgctctgtttcatttatttcattaaaatgttattcctttatttaagattcacttattagtctgctgtttctctgaaaaattttagagctaggtatagtgaccgtgaactttctaacgcataatattctgtgatacagccattccgtacatgtgtgaagtcctgcataactttcgaactttgttaaatgttggcactaggagtcatcagatctaggcttcatcattttccagtgagaagcagagacccaaagggcctgttacttgtgcttggtcaggggactgtctgtcatgcctggaggctcttcggcacacttccccatctttcccttctgccactgtggcttcaagcacctctgttcatagagcgtctctgaaattgagtctcggtcatgacttatcccgaagtagagcaatgtgtttcctctcattgtagtttcaggactttgtcagtacaagctctgccctaggcttgttactttatactcatatcctgaaaagatgtgatttcatctatgaaggggtaaaatattggtttgtatttaattgtttgaaataaaagtgatccctatattgaatctcatgcctgttaatatctacactgtaagtagtgacttcaaaaaaattctaagataggtagtcaggagagtttgccattataaaaggtgtcttaataatatggaatattgacctaactggagatgaggtaattaattaccgaaatgttgaaaatgttttgagaactctccccattttggggtattccttgttcatttgaatttggtgactccctactgttccagtttcagtgccaacttgggtcacactgttcacatcaggggagaccttgccttggggacgtaggcgggcctcttgcaacttgtgctgttgaccttctgtcttgtggaactctctctcctgcatctgctacctgcccgcagatggtgtgagggagggttgatggcgggaagccaggaagtagatgtcatcatggtattggccaggcttttacttcaactctttttgtggcgttagatttaaggaagcagggggcatggccaacgttgagtcttggcccagtggacatagtgcggctttcccttgagcactgcccagatgcaggacctgcacatgttacaggtttgccaaaagcatcttttttttt

SEQ ID NO: 475 - DNA, 1465 bp, Homo sapiens
gctacacctacacgctgaccatcacaggcacacagaggcacatccacctcacatccacctcatacttgtgtactctcagggttcagtctttcatcctatccctctctgatctgtgcctcccaataccttccaagatgtttacagagacccttctccctgtgcagttaggagtgtaaggcaagagagcccctacttcatggggcagatcaagagctgagaccaaagatggtctatgttgctgaccttgtcctgtcctcctgctgtcttaaactatgatccctgctgcggtcactgaagcctttccctgagccaccatgcagtgcttcagcttcattaagaccatgatgatcctcttcaatttgctcatctttctgtgtggtgcagccctgttggcagtgggcatctgggtgtcaatcgatggggcatcctttctgaagatcttcgggccactgtcgtccagtgccatgcagtttgtcaacgtgggctacttcctcatcgcagccggcgttgtggtctttgctcttggtttcctgggctgctatggtgctaagactgagagcaagtgtgccctcgtgacgttcttcttcatcctcctcctcatcttcattgctgaggttgcagctgctgtggtcgccttggtgtacaccacaatggctgagcacttcctgacgttgctggtagtgcctgccatcaagaaagattatggttcccaggaagacttcactcaagtgtggaacaccaccatgaaagggctcaagtgctgtggcttcaccaactatacggattttgaggactcaccctacttcaaagagaacagtgcctttcccccattctgttgcaatgacaacgtcaccaacacagccaatgaaacctgcaccaagcaaaaggctcacgaccaaaaagtagagggttgcttcaatcagcttttgtatgacatccgaactaatgcagtcaccgtgggtggtgtggcagctggaattgggggcctcgagctggctgccatgattgtgtccatgtatctgtactgcaatctacaataagtccacttctgcctctgccactactgctgccacatgggaactgtgaagaggcaccctggcaagcagcagtgattgggggaggggacaggatctaacaatgtcacttgggccagaatggacctgccctttctgctccagacttggggctagatagggaccactccttttaggcgatgcctgactttccttccattggtgggtggatgggtggggggcattccagagcctctaaggtagccagttctgttgcccattcccccagtctattaaacccttgatatgccccctaggcctagtggtgatcccagtgctctactgggggatgagagaaaggcattttatagcctgggcataagtgaaatcagcagagcctctgggtggatgtgtagaaggcacttcaaaatgcataaacctgttacaatgtt

SEQ ID NO: 476 - DNA, 1292 bp, Homo sapiens
gtgagcagtggtgtgtgagagccaggcgtccctctgcctgcccactcagtggcaacacccgggagctgttttgtcctttgtggagcctcagcagttccctctttcagaactcactgccaagagccctgaacaggagccaccatgcagtgcttcagcttcattaagaccatgatgatcctcttcaatttgctcatctttctgtgtggtgcagccctgttggcagtgggcatctgggtgtcaatcgatggggcatcctttctgaagatcttcgggccactgtcgtccagtgccatgcagtttgtcaacgtgggctacttcctcatcgcagccggcgttgtggtctttgctcttggtttcctgggctgctatggtgctaagactgagagcaagtgtgccctcgtgacgttcttcttcatcctcctcctcatcttcattgctgaggttgcagctgctgtggtcgccttggtgtacaccacaatggctgagcacttcctgacgttgctggtagtgcctgccatcaagaaagattatggttcccaggaagacttcactcaagtgtggaacaccaccatgaaagggctcaagtgctgtggcttcaccaactatacggattttgaggactcaccctacttcaaagagaacagtgcctttcccccattctgttgcaatgacaacgtcaccaacacagccaatgaaacctgcaccaagcaaaaggctcacgaccaaaaagtagagggttgcttcaatcagcttttgtatgacatccgaactaatgcagtcaccgtgggtggtgtggcagctggaattgggggcctcgagctggctgccatgattgtgtccatgtatctgtactgcaatctacaataagtccacttctgcctctgccactactgctgccacatgggaactgtgaagaggcaccctggcaagcagcagtgattgggggaggggacaggatctaacaatgtcacttgggccagaatggacctgccctttctgctccagacttggggctagatagggaccactccttttaggcgatgcctgactttccttccattggtgggtggatgggtggggggcattccagagcctctaaggtagccagttctgttgcccattcccccagtctattaaacccttgatatgccccctaggcctagtggtgatcccagtgctctactgggggatgagagaaaggcattttatagcctgggcataagtgaaatcagcagagcctctgggtggatgtgtagaaggcacttcaaaatgcataaacctgttacaatgtt

SEQ ID NO: 477 - DNA, 1625 bp, Homo sapiens
tcccggcctcagacacacacaccagcagctacacctacacgctgaccatcacaggcacacagaggcacatccacctcacatccacctcatacttgtgtactctcagggttcagtctttcatcctatccctctctgatctgtgcctcccaataccttccaagatgtttacagagacccttctccctgtgcagttaggagtgtaaggcaagagagcccctacttcatggggcagatcaagagctgagaccaaagatggtctatgttgctgaccttgtcctgtcctcctgctgtcttaaactatgatccctgctgcggtcactgaagcctttccctgtgagcagtggtgtgtgagagccaggcgtccctctgcctgcccactcagtggcaacacccgggagctgttttgtcctttgtggagcctcagcagttccctctttcagaactcactgccaagagccctgaacaggagccaccatgcagtgcttcagcttcattaagaccatgatgatcctcttcaatttgctcatctttctgtgtggtgcagccctgttggcagtgggcatctgggtgtcaatcgatggggcatcctttctgaagatcttcgggccactgtcgtccagtgccatgcagtttgtcaacgtgggctacttcctcatcgcagccggcgttgtggtctttgctcttggtttcctgggctgctatggtgctaagactgagagcaagtgtgccctcgtgacgttcttcttcatcctcctcctcatcttcattgctgaggttgcagctgctgtggtcgccttggtgtacaccacaatggctgagcacttcctgacgttgctggtagtgcctgccatcaagaaagattatggttcccaggaagacttcactcaagtgtggaacaccaccatgaaagggctcaagtgctgtggcttcaccaactatacggattttgaggactcaccctacttcaaagagaacagtgcctttcccccattctgttgcaatgacaacgtcaccaacacagccaatgaaacctgcaccaagcaaaaggctcacgaccaaaaagtagagggttgcttcaatcagcttttgtatgacatccgaactaatgcagtcaccgtgggtggtgtggcagctggaattgggggcctcgagctggctgccatgattgtgtccatgtatctgtactgcaatctacaataagtccacttctgcctctgccactactgctgccacatgggaactgtgaagaggcaccctggcaagcagcagtgattgggggaggggacaggatctaacaatgtcacttgggccagaatggacctgccctttctgctccagacttggggctagatagggaccactccttttaggcgatgcctgactttccttccattggtgggtggatgggtggggggcattccagagcctctaaggtagccagttctgttgcccattcccccagtctattaaacccttgatatgccccctaggcctagtggtgatcccagtgctctactgggggatgagagaaaggcattttatagcctgggcataagtgaaatcagcagagcctctgggtggatgtgtagaaggcacttcaaaatgcataaacctgttacaatgtt

SEQ ID NO: 478 - DNA, 1273 bp, Homo sapiens
tcccggcctcagacacacacaccagcagctacacctacacgctgaccatcacaggcacacagaggcacatccacctcacatccacctcatacttgtgtactctcagggttcagtctttcatcctatccctctctgatctgtgcctcccaataccttccaagatgtttacagagacccttctccctgtgcagttaggagtgtaaggcaagagagcccctacttcatggggcagatcaagagctgagaccaaagatggtctatgttgctgaccttgtcctgtcctcctgctgtcttaaactatgatccctgctgcggtcactgaagcctttccctgtgagcagtggtgtgtgagagccaggcgtccctctgcctgcccactcagtggcaacacccgggagctgttttgtcctttgtggagcctcagcagttccctctttcagaactcactgccaagagccctgaacaggagccaccatgcagtgcttcagcttcattaagaccatgatgatcctcttcaatttgctcatctttctgtgtggtgcagccctgttggcagtgggcatctgggtgtcaatcgatggggcatcctttctgaagatcttcgggccactgtcgtccagtgccatgcagtttgtcaacgtgggctacttcctcatcgcagccggcgttgtggtctttgctcttggtttcctgggctgctatggtgctaagactgagagcaagtgtgccctcgtgacgttcttcttcatcctcctcctcatcttcattgctgaggttgcagctgctgtggtcgccttggtgtacaccacaatggctgagcacttcctgacgttgctggtagtgcctgccatcaagaaagattatggttcccaggaagacttcactcaagtgtggaacaccaccatgaaagggctcaagtgctgtggcttcaccaactatacggattttgaggactcaccctacttcaaagagaacagtgcctttcccccattctgttgcaatgacaacgtcaccaacacagccaatgaaacctgcaccaagcaaaaggctcacgaccaaaaagtagagggttgcttcaatcagcttttgtatgacatccgaactaatgcagtcaccgtgggtggtgtggcagctggaattgggggcctcgagctggctgccatgattgtgtccatgtatctgtactgcaatctacaataatgaaatcagcagagcctctgggtggatgtgtagaaggcacttcaaaatgcataaacctgttacaatgttgcca

SEQ ID NO: 479 - DNA, 1532 bp, Homo sapiens
gtggagggcacgcagacattctgggaagccacttgccccacccctgggctgcttcttcttgagatcaggaggggcgttgcccagggctggtgttgccaggtggaggcctgctgaggcagtggttgtggggatcggtctccaggcagcagggggcagcagggtcaaggagaggctaactggccacgggtggggccagcaggcgggcagaaggaggctttaaagcgcctaccctgcctgcaggtgagcagtggtgtgtgagagccaggcgtccctctgcctgcccactcagtggcaacacccgggagctgttttgtcctttgtggagcctcagcagttccctctttcagaactcactgccaagagccctgaacaggagccaccatgcagtgcttcagcttcattaagaccatgatgatcctcttcaatttgctcatctttctgtgtggtgcagccctgttggcagtgggcatctgggtgtcaatcgatggggcatcctttctgaagatcttcgggccactgtcgtccagtgccatgcagtttgtcaacgtgggctacttcctcatcgcagccggcgttgtggtctttgctcttggtttcctgggctgctatggtgctaagactgagagcaagtgtgccctcgtgacgttcttcttcatcctcctcctcatcttcattgctgaggttgcagctgctgtggtcgccttggtgtacaccacaatggctgagcacttcctgacgttgctggtagtgcctgccatcaagaaagattatggttcccaggaagacttcactcaagtgtggaacaccaccatgaaagggctcaagtgctgtggcttcaccaactatacggattttgaggactcaccctacttcaaagagaacagtgcctttcccccattctgttgcaatgacaacgtcaccaacacagccaatgaaacctgcaccaagcaaaaggctcacgaccaaaaagtagagggttgcttcaatcagcttttgtatgacatccgaactaatgcagtcaccgtgggtggtgtggcagctggaattgggggcctcgagctggctgccatgattgtgtccatgtatctgtactgcaatctacaataagtccacttctgcctctgccactactgctgccacatgggaactgtgaagaggcaccctggcaagcagcagtgattgggggaggggacaggatctaacaatgtcacttgggccagaatggacctgccctttctgctccagacttggggctagatagggaccactccttttaggcgatgcctgactttccttccattggtgggtggatgggtggggggcattccagagcctctaaggtagccagttctgttgcccattcccccagtctattaaacccttgatatgccccctaggcctagtggtgatcccagtgctctactgggggatgagagaaaggcattttatagcctgggcataagtgaaatcagcagagcctctgggtggatgtgtagaaggcacttcaaaatgcataaacctgttacaatgtt

SEQ ID NO: 480 - DNA, 1526 bp, Homo sapiens
tatgacgccggagccctctgaccgcacctctgaccacaacaaacccctactccacccgtcttgtttgtcccacccttggtgacgcagagccccagcccagaccccgcccaaagcactcatttaactggtattgcggagccacgaggcttctgcttactgcaactcgctccggccgctgggcgtagctgcgactcggcggagtcccggcggcgcgtccttgttctaacccggcgcgccatgaccgtcgcgcggccgagcgtgcccgcggcgctgcccctcctcggggagctgccccggctgctgctgctggtgctgttgtgcctgccggccgtgtggggtgactgtggccttcccccagatgtacctaatgcccagccagctttggaaggccgtacaagttttcccgaggatactgtaataacgtacaaatgtgaagaaagctttgtgaaaattcctggcgagaaggactcagtgatctgccttaagggcagtcaatggtcagatattgaagagttctgcaatcgtagctgcgaggtgccaacaaggctaaattctgcatccctcaaacagccttatatcactcagaattattttccagtcggtactgttgtggaatatgagtgccgtccaggttacagaagagaaccttctctatcaccaaaactaacttgccttcagaatttaaaatggtccacagcagtcgaattttgtaaaaagaaatcatgccctaatccgggagaaatacgaaatggtcagattgatgtaccaggtggcatattatttggtgcaaccatctccttctcatgtaacacagggtaagtttgggcatactaaaaccctgtatttaggaaatgagaaaacaaattaggacttaaggtgagattgttagtttcatgactggtattcacagctagtagcaattaaaacaatccctctcctcaaagacccttcatcatgagctcatcacagttaaatttagtaaaatgggggcaagaaaggaagatttcttaaaccaccagaattctctaaattctgatttcagtaaatatgtgattcaatataaaattttaaatgtgattaataaaaaaatttgagatgatgatacttgcagaaatcttcaaatgttaaatactaaaccaatctttagttgacctaaataatgaatttgcatgagtttttctatatgcaaacaagctgttacaaaacagcatgagttaaagacattcctagtgtgaaagtattctaagttctttgataagttctctgtatagggagaaggaactcattcattgagtaccatcaatgtctcagacactgttgaaaactttacatttattttctcatttcatatctgtaaattaaataattctattttactctgtgtgtgtccctattctttataaagtaaaaatatcagtatcacttgtctcctatacgaaacacagatattggttaggtcatgaacacaaaatctgggaagtactttgaaccctttaaatataagtacattctattattctgtgaag

SEQ ID NO: 481 - DNA, 1809 bp, Homo sapiens
gcaggtggggagcttggcccgcggtcgtggttcccgccgtcctgtgcctttaaggctctcgccgctcaccagcatttggggctcctgctgtgtcggcccccagctgacttggctttaggggtcggcgtggagggttaaagaggccccggctgggtttgcggagcagccaagcctggcaaaatcgaaagggagggctcaaagagactgtatccttaacccccaaaaagctggtctaaaaggatgggaggccagaccgctgaccgttccccactctcgacagagtccagccgtgtggagcacacgatgctgcaaacttgcatgtcatctctttcaggtgtggcatttcaagggggcttgtgtcttgaaaacagcaactgtgaggacacttgatagtcatttccttcagttctgcttttgtctccctaggtgactgtggccttcccccagatgtacctaatgcccagccagctttggaaggccgtacaagttttcccgaggatactgtaataacgtacaaatgtgaagaaagctttgtgaaaattcctggcgagaaggactcagtgatctgccttaagggcagtcaatggtcagatattgaagagttctgcaatcgtagctgcgaggtgccaacaaggctaaattctgcatccctcaaacagccttatatcactcagaattattttccagtcggtactgttgtggaatatgagtgccgtccaggttacagaagagaaccttctctatcaccaaaactaacttgccttcagaatttaaaatggtccacagcagtcgaattttgtaaaaagaaatcatgccctaatccgggagaaatacgaaatggtcagattgatgtaccaggtggcatattatttggtgcaaccatctccttctcatgtaacacagggtacaaattatttggctcgacttctagtttttgtcttatttcaggcagctctgtccagtggagtgacccgttgccagagtgcagagaaatttattgtccagcaccaccacaaattgacaatggaataattcaaggggaacgtgaccattatggatatagacagtctgtaacgtatgcatgtaataaaggattcaccatgattggagagcactctatttattgtactgtgaataatgatgaaggagagtggagtggcccaccacctgaatgcagagcaacacggagtacacctgtttccaggacaaccaagcattttcatgaaacaaccccaaataaaggaagtggaaccacttcaggtactacccgtcttctatctgggcacacgtgtttcacgttgacaggtttgcttgggacgctagtaaccatgggcttgctgacttagccaaagaagagttaagaagaaaatacacacaagtatacagactgttcctagtttcttagacttatctgcatattggataaaataaatgcaattgtgctcttcatttaggatgctttcattgtctttaagatgtgttaggaatgtcaacagagcaaggagaaaaaaggcagtcctggaatcacattcttagcacacctacacctcttgaaaatagaacaacttgcagaattgagagtgattcctttcctaaaagtgtagtgatttttttccacaagatctgtaatgttatttccacttataaaggaaataaaaaatgaaaaacattatttggatatcaaaagcaaataaaaacccaattcagtctcttctaagcaaaattgctaaagagagatgaaccacattataaagtaatctttggctgtaaggcattttcatctttccttcgggttggcaaaatatttta

SEQ ID NO: 482 - DNA, 1964 bp, Homo sapiens
tatgacgccggagccctctgaccgcacctctgaccacaacaaacccctactccacccgtcttgtttgtcccacccttggtgacgcagagccccagcccagaccccgcccaaagcactcatttaactggtattgcggagccacgaggcttctgcttactgcaactcgctccggccgctgggcgtagctgcgactcggcggagtcccggcggcgcgtccttgttctaacccggcgcgccatgaccgtcgcgcggccgagcgtgcccgcggcgctgcccctcctcggggagctgccccggctgctgctgctggtgctgttgtgcctgccggccgtgtggggtgactgtggccttcccccagatgtacctaatgcccagccagctttggaaggccgtacaagttttcccgaggatactgtaataacgtacaaatgtgaagaaagctttgtgaaaattcctggcgagaaggactcagtgatctgccttaagggcagtcaatggtcagatattgaagagttctgcaatcgtagctgcgaggtgccaacaaggctaaattctgcatccctcaaacagccttatatcactcagaattattttccagtcggtactgttgtggaatatgagtgccgtccaggttacagaagagaaccttctctatcaccaaaactaacttgccttcagaatttaaaatggtccacagcagtcgaattttgtaaaaagaaatcatgccctaatccgggagaaatacgaaatggtcagattgatgtaccaggtggcatattatttggtgcaaccatctccttctcatgtaacacagggtacaaattatttggctcgacttctagtttttgtcttatttcaggcagctctgtccagtggagtgacccgttgccagagtgcagagaaatttattgtccagcaccaccacaaattgacaatggaataattcaaggggaacgtgaccattatggatatagacagtctgtaacgtatgcatgtaataaaggattcaccatgattggagagcactctatttattgtactgtgaataatgatgaaggagagtggagtggcccaccacctgaatgcagaggaaaatctctaacttccaaggtcccaccaacagttcagaaacctaccacagtaaatgttccaactacagaagtctcaccaacttctcagaaaaccaccacaaaaaccaccacaccaaatgctcaagcaacacggagtacacctgtttccaggacaaccaagcattttcatgaaacaaccccaaataaaggaagtggaaccacttcaggtactacccgtcttctatctggttctcgtcctgtcacccaggctggtatgcggtggtgtgatcgtagctcactgcagtctcgaactcctgggttcaagcgatccttccacttcagcctcccaagtagctggtactacagggcacacgtgtttcacgttgacaggtttgcttgggacgctagtaaccatgggcttgctgacttagccaaagaagagttaagaagaaaatacacacaagtatacagactgttcctagtttcttagacttatctgcatattggataaaataaatgcaattgtgctcttcatttaggatgctttcattgtctttaagatgtgttaggaatgtcaacagagcaaggagaaaaaaggcagtcctggaatcacattcttagcacacctacacctcttgaaaatagaacaacttgcagaattgagagtgattcctttcctaaaagtgtagtgatttttttccacaagatctgtaatgttatttccacttataaaggaaataaaaaatgaaaaacattatttggatatcaaaagcaaataaaaacccaattcagtctcttctaagcaaaattgctaaagagagatgaaccacattataaagtaatctttggctgtaaggcattttcatctttccttcgggttggcaaaatatttta

SEQ ID NO: 483 - DNA, 1636 bp, Homo sapiens
gcaggtggggagcttggcccgcggtcgtggttcccgccgtcctgtgcctttaaggctctcgccgctcaccagcatttggggctcctgctgtgtcggcccccagctgacttggctttaggggtcggcgtggagggttaaagaggccccggctgggtttgcggagcagccaagcctggcaaaatcgaaagggagggctcaaagagactgtatccttaacccccaaaaagctggtctaaaaggatgggaggccagaccgctgaccgttccccactctcgacagagtccagccgtgtggagcacacgatgctgcaaacttgcatgtcatctctttcaggtgtggcatttcaagggggcttgtgtcttgaaaacagcaactgtgaggacacttgatagtcatttccttcagttctgcttttgtctccctaggtgactgtggccttcccccagatgtacctaatgcccagccagctttggaaggccgtacaagttttcccgaggatactgtaataacgtacaaatgtgaagaaagctttgtgaaaattcctggcgagaaggactcagtgatctgccttaagggcagtcaatggtcagatattgaagagttctgcaatcgtagctgcgaggtgccaacaaggctaaattctgcatccctcaaacagccttatatcactcagaattattttccagtcggtactgttgtggaatatgagtgccgtccaggttacagaagagaaccttctctatcaccaaaactaacttgccttcagaatttaaaatggtccacagcagtcgaattttgtaaaaagaaatcatgccctaatccgggagaaatacgaaatggtcagattgatgtaccaggtggcatattatttggtgcaaccatctccttctcatgtaacacagggtacaaattatttggctcgacttctagtttttgtcttatttcaggcagctctgtccagtggagtgacccgttgccagagtgcagagaaatttattgtccagcaccaccacaaattgacaatggaataattcaaggggaacgtgaccattatggatatagacagtctgtaacgtatgcatgtaataaaggattcaccatgattggagagcactctatttattgtactgtgaataatgatgaaggagagtggagtggcccaccacctgaatgcagaggaaaatctctaacttccaaggtcccaccaacagttcagaaacctaccacagtaaatgttccaactacagaagtctcaccaacttctcagaaaaccaccacaaaaaccaccacaccaaatgctcaagcaacacggagtacacctgtttccaggacaaccaagcattttcatgaaacaaccccaaataaaggaagtggaaccacttcaggtcagttgacactgttcaggtttactgagtatggatctaatgtgctatggtggaaatatgaacttgaccaagattgcaggattaaatggtctctaatttattgtagccagggtttttcatactaatactttttactttatttggaagcggacttggattgtactagggcaaatctttaaaaaaagaaacatttacaataatagagaaaaagactgtggccccattaaaaaaatgctaaattaagattggt

SEQ ID NO: 484 - DNA, 1935 bp, Homo sapiens
gcaggtggggagcttggcccgcggtcgtggttcccgccgtcctgtgcctttaaggctctcgccgctcaccagcatttggggctcctgctgtgtcggcccccagctgacttggctttaggggtcggcgtggagggttaaagaggccccggctgggtttgcggagcagccaagcctggcaaaatcgaaagggagggctcaaagagactgtatccttaacccccaaaaagctggtctaaaaggatgggaggccagaccgctgaccgttccccactctcgacagagtccagccgtgtggagcacacgatgctgcaaacttgcatgtcatctctttcaggtgtggcatttcaagggggcttgtgtcttgaaaacagcaactgtgaggacacttgatagtcatttccttcagttctgcttttgtctccctaggtgactgtggccttcccccagatgtacctaatgcccagccagctttggaaggccgtacaagttttcccgaggatactgtaataacgtacaaatgtgaagaaagctttgtgaaaattcctggcgagaaggactcagtgatctgccttaagggcagtcaatggtcagatattgaagagttctgcaatcgtagctgcgaggtgccaacaaggctaaattctgcatccctcaaacagccttatatcactcagaattattttccagtcggtactgttgtggaatatgagtgccgtccaggttacagaagagaaccttctctatcaccaaaactaacttgccttcagaatttaaaatggtccacagcagtcgaattttgtaaaaagaaatcatgccctaatccgggagaaatacgaaatggtcagattgatgtaccaggtggcatattatttggtgcaaccatctccttctcatgtaacacagggtacaaattatttggctcgacttctagtttttgtcttatttcaggcagctctgtccagtggagtgacccgttgccagagtgcagagaaatttattgtccagcaccaccacaaattgacaatggaataattcaaggggaacgtgaccattatggatatagacagtctgtaacgtatgcatgtaataaaggattcaccatgattggagagcactctatttattgtactgtgaataatgatgaaggagagtggagtggcccaccacctgaatgcagaggaaaatctctaacttccaaggtcccaccaacagttcagaaacctaccacagtaaatgttccaactacagaagtctcaccaacttctcagaaaaccaccacaaaaaccaccacaccaaatgctcaagcaacacggagtacacctgtttccaggacaaccaagcattttcatgaaacaaccccaaataaaggaagtggaaccacttcaggtactacccgtcttctatctgggcacacgtgtttcacgttgacaggtttgcttgggacgctagtaaccatgggcttgctgacttagccaaagaagagttaagaagaaaatacacacaagtatacagactgttcctagtttcttagacttatctgcatattggataaaataaatgcaattgtgctcttcatttaggatgctttcattgtctttaagatgtgttaggaatgtcaacagagcaaggagaaaaaaggcagtcctggaatcacattcttagcacacctacacctcttgaaaatagaacaacttgcagaattgagagtgattcctttcctaaaagtgtagtgatttttttccacaagatctgtaatgttatttccacttataaaggaaataaaaaatgaaaaacattatttggatatcaaaagcaaataaaaacccaattcagtctcttctaagcaaaattgctaaagagagatgaaccacattataaagtaatctttggctgtaaggcattttcatctttccttcgggttggcaaaatatttta

SEQ ID NO: 485 - DNA, 1846 bp, Homo sapiens
tatgacgccggagccctctgaccgcacctctgaccacaacaaacccctactccacccgtcttgtttgtcccacccttggtgacgcagagccccagcccagaccccgcccaaagcactcatttaactggtattgcggagccacgaggcttctgcttactgcaactcgctccggccgctgggcgtagctgcgactcggcggagtcccggcggcgcgtccttgttctaacccggcgcgccatgaccgtcgcgcggccgagcgtgcccgcggcgctgcccctcctcggggagctgccccggctgctgctgctggtgctgttgtgcctgccggccgtgtggggtgactgtggccttcccccagatgtacctaatgcccagccagctttggaaggccgtacaagttttcccgaggatactgtaataacgtacaaatgtgaagaaagctttgtgaaaattcctggcgagaaggactcagtgatctgccttaagggcagtcaatggtcagatattgaagagttctgcaatcgtagctgcgaggtgccaacaaggctaaattctgcatccctcaaacagccttatatcactcagaattattttccagtcggtactgttgtggaatatgagtgccgtccaggttacagaagagaaccttctctatcaccaaaactaacttgccttcagaatttaaaatggtccacagcagtcgaattttgtaaaaagaaatcatgccctaatccgggagaaatacgaaatggtcagattgatgtaccaggtggcatattatttggtgcaaccatctccttctcatgtaacacagggtacaaattatttggctcgacttctagtttttgtcttatttcaggcagctctgtccagtggagtgacccgttgccagagtgcagagaaatttattgtccagcaccaccacaaattgacaatggaataattcaaggggaacgtgaccattatggatatagacagtctgtaacgtatgcatgtaataaaggattcaccatgattggagagcactctatttattgtactgtgaataatgatgaaggagagtggagtggcccaccacctgaatgcagaggaaaatctctaacttccaaggtcccaccaacagttcagaaacctaccacagtaaatgttccaactacagaagtctcaccaacttctcagaaaaccaccacaaaaaccaccacaccaaatgctcaagcaacacggagtacacctgtttccaggacaaccaagcattttcatgaaacaaccccaaataaaggaagtggaaccacttcaggtactacccgtcttctatctgggcacacgtgtttcacgttgacaggtttgcttgggacgctagtaaccatgggcttgctgacttagccaaagaagagttaagaagaaaatacacacaagtatacagactgttcctagtttcttagacttatctgcatattggataaaataaatgcaattgtgctcttcatttaggatgctttcattgtctttaagatgtgttaggaatgtcaacagagcaaggagaaaaaaggcagtcctggaatcacattcttagcacacctacacctcttgaaaatagaacaacttgcagaattgagagtgattcctttcctaaaagtgtagtgatttttttccacaagatctgtaatgttatttccacttataaaggaaataaaaaatgaaaaacattatttggatatcaaaagcaaataaaaacccaattcagtctcttctaagcaaaattgctaaagagagatgaaccacattataaagtaatctttggctgtaaggcattttcatctttccttcgggttggcaaaatatttta

SEQ ID NO: 486 - DNA, 2640 bp, Homo sapiens
tatgacgccggagccctctgaccgcacctctgaccacaacaaacccctactccacccgtcttgtttgtcccacccttggtgacgcagagccccagcccagaccccgcccaaagcactcatttaactggtattgcggagccacgaggcttctgcttactgcaactcgctccggccgctgggcgtagctgcgactcggcggagtcccggcggcgcgtccttgttctaacccggcgcgccatgaccgtcgcgcggccgagcgtgcccgcggcgctgcccctcctcggggagctgccccggctgctgctgctggtgctgttgtgcctgccggccgtgtggggtgactgtggccttcccccagatgtacctaatgcccagccagctttggaaggccgtacaagttttcccgaggatactgtaataacgtacaaatgtgaagaaagctttgtgaaaattcctggcgagaaggactcagtgatctgccttaagggcagtcaatggtcagatattgaagagttctgcaatcgtagctgcgaggtgccaacaaggctaaattctgcatccctcaaacagccttatatcactcagaattattttccagtcggtactgttgtggaatatgagtgccgtccaggttacagaagagaaccttctctatcaccaaaactaacttgccttcagaatttaaaatggtccacagcagtcgaattttgtaaaaagaaatcatgccctaatccgggagaaatacgaaatggtcagattgatgtaccaggtggcatattatttggtgcaaccatctccttctcatgtaacacagggtacaaattatttggctcgacttctagtttttgtcttatttcaggcagctctgtccagtggagtgacccgttgccagagtgcagagaaatttattgtccagcaccaccacaaattgacaatggaataattcaaggggaacgtgaccattatggatatagacagtctgtaacgtatgcatgtaataaaggattcaccatgattggagagcactctatttattgtactgtgaataatgatgaaggagagtggagtggcccaccacctgaatgcagaggaaaatctctaacttccaaggtcccaccaacagttcagaaacctaccacagtaaatgttccaactacagaagtctcaccaacttctcagaaaaccaccacaaaaaccaccacaccaaatgctcaagcaacacggagtacacctgtttccaggacaaccaagcattttcatgaaacaaccccaaataaaggaagtggaaccacttcaggtactacccgtcttctatctgggcacacgtgtttcacgttgacaggtttgcttgggacgctagtaaccatgggcttgctgacttagccaaagaagagttaagaagaaaatacacacaagtatacagactgttcctagtttcttagacttatctgcatattggataaaataaatgcaattgtgctcttcatttaggatgctttcattgtctttaagatgtgttaggaatgtcaacagagcaaggagaaaaaaggcagtcctggaatcacattcttagcacacctacacctcttgaaaatagaacaacttgcagaattgagagtgattcctttcctaaaagtgtaagaaagcatagagatttgttcgtatttagaatgggatcacgaggaaaagagaaggaaagtgatttttttccacaagatctgtaatgttatttccacttataaaggaaataaaaaatgaaaaacattatttggatatcaaaagcaaataaaaacccaattcagtctcttctaagcaaaattgctaaagagagatgaaccacattataaagtaatctttggctgtaaggcattttcatctttccttcgggttggcaaaatattttaaaggtaaaacatgctggtgaaccaggggtgttgatggtgataagggaggaatatagaatgaaagactgaatcttcctttgttgcacaaatagagtttggaaaaagcctgtgaaaggtgtcttctttgacttaatgtctttaaaagtatccagagatactacaatattaacataagaaaagattatatattatttctgaatcgagatgtccatagtcaaatttgtaaatcttattcttttgtaatatttatttatatttatttatgacagtgaacattctgattttacatgtaaaacaagaaaagttgaagaagatatgtgaagaaaaatgtatttttcctaaatagaaataaatgatcccattttttggtatcatgtagtatgtgaaatttattcttaaacgtgactactttatttctaaataagaaattccctacctgcttcctacaagcagttcagaatgccatgccttggttgtcctagtgtgaataattttcagctactttaaaattatattgtactttctcaagcatgtcatatcctttcctattagagtatctatattacttgttactgatttacctgaaggcaatctgattaatttctaggtttttaccatattcttgtcatcttgccaattacattttaagtgttagactagactaagatgtactagttgtatagaatataactagatttattatggcaatgtttattttgtcattttgcttcatctg

SEQ ID NO: 487 - DNA, 2102 bp, Homo sapiens
ccgctgggcgtagctgcgactcggcggagtcccggcggcgcgtccttgttctaacccggcgcgccatgaccgtcgcgcggccgagcgtgcccgcggcgctgcccctcctcggggagctgccccggctgctgctgctggtgctgttgtgcctgccggccgtgtggggtgactgtggccttcccccagatgtacctaatgcccagccagctttggaaggccgtacaagttttcccgaggatactgtaataacgtacaaatgtgaagaaagctttgtgaaaattcctggcgagaaggactcagtgatctgccttaagggcagtcaatggtcagatattgaagagttctgcaatcgtagctgcgaggtgccaacaaggctaaattctgcatccctcaaacagccttatatcactcagaattattttccagtcggtactgttgtggaatatgagtgccgtccaggttacagaagagaaccttctctatcaccaaaactaacttgccttcagaatttaaaatggtccacagcagtcgaattttgtaaaaagaaatcatgccctaatccgggagaaatacgaaatggtcagattgatgtaccaggtggcatattatttggtgcaaccatctccttctcatgtaacacagggtacaaattatttggctcgacttctagtttttgtcttatttcaggcagctctgtccagtggagtgacccgttgccagagtgcagagaaatttattgtccagcaccaccacaaattgacaatggaataattcaaggggaacgtgaccattatggatatagacagtctgtaacgtatgcatgtaataaaggattcaccatgattggagagcactctatttattgtactgtgaataatgatgaaggagagtggagtggcccaccacctgaatgcagaggaaaatctctaacttccaaggtcccaccaacagttcagaaacctaccacagtaaatgttccaactacagaagtctcaccaacttctcagaaaaccaccacaaaaaccaccacaccaaatgctcaagcaacacggagtacacctgtttccaggacaaccaagcattttcatgaaacaaccccaaataaaggaagtggaaccacttcaggtactacccgtcttctatctgggcacacgtgtttcacgttgacaggtttgcttgggacgctagtaaccatgggcttgctgacttagccaaagaagagttaagaagaaaatacacacaagtatacagactgttcctagtttcttagacttatctgcatattggataaaataaatgcaattgtgctcttcatttaggatgctttcattgtctttaagatgtgttaggaatgtcaacagagcaaggagaaaaaaggcagtcctggaatcacattcttagcacacctacacctcttgaaaatagaacaacttgcagaattgagagtgattcctttcctaaaagtgtaagaaagcatagagatttgttcgtatttagaatgggatcacgaggaaaagagaaggaaagtgatttttttccacaagatctgtaatgttatttccacttataaaggaaataaaaaatgaaaaacattatttggatatcaaaagcaaataaaaacccaattcagtctcttctaagcaaaattgctaaagagagatgaaccacattataaagtaatctttggctgtaaggcattttcatctttccttcgggttggcaaaatattttaaaggtaaaacatgctggtgaaccaggggtgttgatggtgataagggaggaatatagaatgaaagactgaatcttcctttgttgcacaaatagagtttggaaaaagcctgtgaaaggtgtcttctttgacttaatgtctttaaaagtatccagagatactacaatattaacataagaaaagattatatattatttctgaatcgagatgtccatagtcaaatttgtaaatcttattcttttgtaatatttatttatatttatttatgacagtgaacattctgattttacatgtaaaacaagaaaagttgaagaagatatgtgaagaaaaatgtatttttcctaaatagaaataaatgatcccattttttggt

SEQ ID NO: 488 - DNA, 3126 bp, Homo sapiens
cggctcgggccacgcccacctgtcctgcagcactggatgctttgtgagttggggattgttgcgtcccatatctggacccagaagggacttccctgctcggctggctctcggtttctctgctttcctccggagaaataacagcgtcttccgcgccgcgcatggagcctcccggccgccgcgagtgtccctttccttcctggcgctttcctgggttgcttctggcggccatggtgttgctgctgtactccttctccgatgcctgtgaggagccaccaacatttgaagctatggagctcattggtaaaccaaaaccctactatgagattggtgaacgagtagattataagtgtaaaaaaggatacttctatatacctcctcttgccacccatactatttgtgatcggaatcatacatggctacctgtctcagatgacgcctgttatagagaaacatgtccatatatacgggatcctttaaatggccaagcagtccctgcaaatgggacttacgagtttggttatcagatgcactttatttgtaatgagggttattacttaattggtgaagaaattctatattgtgaacttaaaggatcagtagcaatttggagcggtaagcccccaatatgtgaaaaggttttgtgtacaccacctccaaaaataaaaaatggaaaacacacctttagtgaagtagaagtatttgagtatcttgatgcagtaacttatagttgtgatcctgcacctggaccagatccattttcacttattggagagagcacgatttattgtggtgacaattcagtgtggagtcgtgctgctccagagtgtaaagtggtcaaatgtcgatttccagtagtcgaaaatggaaaacagatatcaggatttggaaaaaaattttactacaaagcaacagttatgtttgaatgcgataagggtttttacctcgatggcagcgacacaattgtctgtgacagtaacagtacttgggatcccccagttccaaagtgtcttaaaggtcctaggcctacttacaagcctccagtctcaaattatccaggatatcctaaacctgaggaaggaatacttgacagtttggatgtttgggtcattgctgtgattgttattgccataggaaagcagatggtggagctgaatatgccacttaccagactaaatcaaccactccagcagagcagagaggctgaatagattccacaacctggtttgccagttcatcttttgactctattaaaatcttcaatagttgttattctgtagtttcactctcatgagtgcaactgtggcttagctaatattgcaatgtggcttgaatgtaggtagcatcctttgatgcttctttgaaacttgtatgaatttgggtatgaacagattgcctgctttcccttaaataacacttagatttattggaccagtcagcacagcatgcctggttgtattaaagcagggatatgctgtattttataaaattggcaaaattagagaaatatagttcacaatgaaattatattttctttgtaaagaaagtggcttgaaatcttttttgttcaaagattaatgccaactcttaagattattctttcaccaactatagaatgtattttatatatcgttcattgtaaaaagcccttaaaaatatgtgtatactactttggctcttgtgcataaaaacaagaacactgaaaattgggaatatgcacaaacttggcttctttaaccaagaatattattggaaaattctctaaaagttaatagggtaaattctctattttttgtaatgtgttcggtgatttcagaaagctagaaagtgtatgtgtggcatttgttttcactttttaaaacatccctaactgatcgaatatatcagtaatttcagaatcagatgcatcctttcataagaagtgagaggactctgacagccataacaggagtgccacttcatggtgcgaagtgaacactgtagtcttgttgttttcccaaagagaactccgtatgttctcttaggttgagtaacccactctgaattctggttacatgtgtttttctctccctccttaaataaagagaggggttaaacatgccctctaaaagtaggtggttttgaagagaataaattcatcagataacctcaagtcacatgagaatcttagtccatttacattgccttggctagtaaaagccatctatgtatatgtcttacctcatctcctaaaaggcagagtacaaagtaagccatgtatctcaggaaggtaacttcattttgtctatttgctgttgattgtaccaagggatggaagaagtaaatatagctcaggtagcactttatactcaggcagatctcagccctctactgagtcccttagccaagcagtttctttcaaagaagccagcaggcgaaaagcagggactgccactgcatttcatatcacactgttaaaagttgtgttttgaaattttatgtttagttgcacaaattgggccaaagaaacattgccttgaggaagatatgattggaaaatcaagagtgtagaagaataaatactgttttactgtccaaagacatgtttatagtgctctgtaaatgttcctttcctttgtagtctctggcaagatgctttaggaagataaaagtttgaggagaacaaacaggaattctgaattaagcacagagttgaagtttatacccgtttcacatgcttttcaagaatgtcgcaattactaagaagcagataatggtgttttttagaaacctaattgaagtatattcaaccaaatactttaatgtataaaataaatattatacaatatacttgtatagcagtttctgcttcacatttgattttttcaaatttaatatttatattagagatctatatatgtataaatatgtattttgtcaaatttgttacttaaatatatagagaccagttttctctggaagtttgtttaaatgacagaagcgtatatgaattcaagaaaatttaagctgcaaaaatgtatttgctataaaatgagaagtctcactgatagaggttctttattgctcattttttaaaaaatggactcttgaaatctgttaaaataaaattgtacatttggagatgtttca

SEQ ID NO: 489 - DNA, 3199 bp, Homo sapiens
cggctcgggccacgcccacctgtcctgcagcactggatgctttgtgagttggggattgttgcgtcccatatctggacccagaagggacttccctgctcggctggctctcggtttctctgctttcctccggagaaataacagcgtcttccgcgccgcgcatggagcctcccggccgccgcgagtgtccctttccttcctggcgctttcctgggttgcttctggcggccatggtgttgctgctgtactccttctccgatgcctgtgaggagccaccaacatttgaagctatggagctcattggtaaaccaaaaccctactatgagattggtgaacgagtagattataagtgtaaaaaaggatacttctatatacctcctcttgccacccatactatttgtgatcggaatcatacatggctacctgtctcagatgacgcctgttatagagaaacatgtccatatatacgggatcctttaaatggccaagcagtccctgcaaatgggacttacgagtttggttatcagatgcactttatttgtaatgagggttattacttaattggtgaagaaattctatattgtgaacttaaaggatcagtagcaatttggagcggtaagcccccaatatgtgaaaaggttttgtgtacaccacctccaaaaataaaaaatggaaaacacacctttagtgaagtagaagtatttgagtatcttgatgcagtaacttatagttgtgatcctgcacctggaccagatccattttcacttattggagagagcacgatttattgtggtgacaattcagtgtggagtcgtgctgctccagagtgtaaagtggtcaaatgtcgatttccagtagtcgaaaatggaaaacagatatcaggatttggaaaaaaattttactacaaagcaacagttatgtttgaatgcgataagggtttttacctcgatggcagcgacacaattgtctgtgacagtaacagtacttgggatcccccagttccaaagtgtcttaaaggtcctaggcctacttacaagcctccagtctcaaattatccaggatatcctaaacctgaggaaggaatacttgacagtttggatgtttgggtcattgctgtgattgttattgccatagttgttggagttgcagtaatttgtgttgtcccgtacagatatcttcaaaggaggaagaagaaagggaaagcagatggtggagctgaatatgccacttaccagactaaatcaaccactccagcagagcagagaggctgaatagattccacaacctggtttgccagttcatcttttgactctattaaaatcttcaatagttgttattctgtagtttcactctcatgagtgcaactgtggcttagctaatattgcaatgtggcttgaatgtaggtagcatcctttgatgcttctttgaaacttgtatgaatttgggtatgaacagattgcctgctttcccttaaataacacttagatttattggaccagtcagcacagcatgcctggttgtattaaagcagggatatgctgtattttataaaattggcaaaattagagaaatatagttcacaatgaaattatattttctttgtaaagaaagtggcttgaaatcttttttgttcaaagattaatgccaactcttaagattattctttcaccaactatagaatgtattttatatatcgttcattgtaaaaagcccttaaaaatatgtgtatactactttggctcttgtgcataaaaacaagaacactgaaaattgggaatatgcacaaacttggcttctttaaccaagaatattattggaaaattctctaaaagttaatagggtaaattctctattttttgtaatgtgttcggtgatttcagaaagctagaaagtgtatgtgtggcatttgttttcactttttaaaacatccctaactgatcgaatatatcagtaatttcagaatcagatgcatcctttcataagaagtgagaggactctgacagccataacaggagtgccacttcatggtgcgaagtgaacactgtagtcttgttgttttcccaaagagaactccgtatgttctcttaggttgagtaacccactctgaattctggttacatgtgtttttctctccctccttaaataaagagaggggttaaacatgccctctaaaagtaggtggttttgaagagaataaattcatcagataacctcaagtcacatgagaatcttagtccatttacattgccttggctagtaaaagccatctatgtatatgtcttacctcatctcctaaaaggcagagtacaaagtaagccatgtatctcaggaaggtaacttcattttgtctatttgctgttgattgtaccaagggatggaagaagtaaatatagctcaggtagcactttatactcaggcagatctcagccctctactgagtcccttagccaagcagtttctttcaaagaagccagcaggcgaaaagcagggactgccactgcatttcatatcacactgttaaaagttgtgttttgaaattttatgtttagttgcacaaattgggccaaagaaacattgccttgaggaagatatgattggaaaatcaagagtgtagaagaataaatactgttttactgtccaaagacatgtttatagtgctctgtaaatgttcctttcctttgtagtctctggcaagatgctttaggaagataaaagtttgaggagaacaaacaggaattctgaattaagcacagagttgaagtttatacccgtttcacatgcttttcaagaatgtcgcaattactaagaagcagataatggtgttttttagaaacctaattgaagtatattcaaccaaatactttaatgtataaaataaatattatacaatatacttgtatagcagtttctgcttcacatttgattttttcaaatttaatatttatattagagatctatatatgtataaatatgtattttgtcaaatttgttacttaaatatatagagaccagttttctctggaagtttgtttaaatgacagaagcgtatatgaattcaagaaaatttaagctgcaaaaatgtatttgctataaaatgagaagtctcactgatagaggttctttattgctcattttttaaaaaatggactcttgaaatctgttaaaataaaattgtacatttggagatgtttcatgatgatgt

SEQ ID NO: 490 - DNA, 3235 bp, Homo sapiens
cggctcgggccacgcccacctgtcctgcagcactggatgctttgtgagttggggattgttgcgtcccatatctggacccagaagggacttccctgctcggctggctctcggtttctctgctttcctccggagaaataacagcgtcttccgcgccgcgcatggagcctcccggccgccgcgagtgtccctttccttcctggcgctttcctgggttgcttctggcggccatggtgttgctgctgtactccttctccgatgcctgtgaggagccaccaacatttgaagctatggagctcattggtaaaccaaaaccctactatgagattggtgaacgagtagattataagtgtaaaaaaggatacttctatatacctcctcttgccacccatactatttgtgatcggaatcatacatggctacctgtctcagatgacgcctgttatagagaaacatgtccatatatacgggatcctttaaatggccaagcagtccctgcaaatgggacttacgagtttggttatcagatgcactttatttgtaatgagggttattacttaattggtgaagaaattctatattgtgaacttaaaggatcagtagcaatttggagcggtaagcccccaatatgtgaaaaggttttgtgtacaccacctccaaaaataaaaaatggaaaacacacctttagtgaagtagaagtatttgagtatcttgatgcagtaacttatagttgtgatcctgcacctggaccagatccattttcacttattggagagagcacgatttattgtggtgacaattcagtgtggagtcgtgctgctccagagtgtaaagtggtcaaatgtcgatttccagtagtcgaaaatggaaaacagatatcaggatttggaaaaaaattttactacaaagcaacagttatgtttgaatgcgataagggtttttacctcgatggcagcgacacaattgtctgtgacagtaacagtacttgggatcccccagttccaaagtgtcttaaagtgtcgacttcttccactacaaaatctccagcgtccagtgcctcaggtcctaggcctacttacaagcctccagtctcaaattatccaggatatcctaaacctgaggaaggaatacttgacagtttggatgtttgggtcattgctgtgattgttattgccatagttgttggagttgcagtaatttgtgttgtcccgtacagatatcttcaaaggaggaagaagaaagggaaagcagatggtggagctgaatatgccacttaccagactaaatcaaccactccagcagagcagagaggctgaatagattccacaacctggtttgccagttcatcttttgactctattaaaatcttcaatagttgttattctgtagtttcactctcatgagtgcaactgtggcttagctaatattgcaatgtggcttgaatgtaggtagcatcctttgatgcttctttgaaacttgtatgaatttgggtatgaacagattgcctgctttcccttaaataacacttagatttattggaccagtcagcacagcatgcctggttgtattaaagcagggatatgctgtattttataaaattggcaaaattagagaaatatagttcacaatgaaattatattttctttgtaaagaaagtggcttgaaatcttttttgttcaaagattaatgccaactcttaagattattctttcaccaactatagaatgtattttatatatcgttcattgtaaaaagcccttaaaaatatgtgtatactactttggctcttgtgcataaaaacaagaacactgaaaattgggaatatgcacaaacttggcttctttaaccaagaatattattggaaaattctctaaaagttaatagggtaaattctctattttttgtaatgtgttcggtgatttcagaaagctagaaagtgtatgtgtggcatttgttttcactttttaaaacatccctaactgatcgaatatatcagtaatttcagaatcagatgcatcctttcataagaagtgagaggactctgacagccataacaggagtgccacttcatggtgcgaagtgaacactgtagtcttgttgttttcccaaagagaactccgtatgttctcttaggttgagtaacccactctgaattctggttacatgtgtttttctctccctccttaaataaagagaggggttaaacatgccctctaaaagtaggtggttttgaagagaataaattcatcagataacctcaagtcacatgagaatcttagtccatttacattgccttggctagtaaaagccatctatgtatatgtcttacctcatctcctaaaaggcagagtacaaagtaagccatgtatctcaggaaggtaacttcattttgtctatttgctgttgattgtaccaagggatggaagaagtaaatatagctcaggtagcactttatactcaggcagatctcagccctctactgagtcccttagccaagcagtttctttcaaagaagccagcaggcgaaaagcagggactgccactgcatttcatatcacactgttaaaagttgtgttttgaaattttatgtttagttgcacaaattgggccaaagaaacattgccttgaggaagatatgattggaaaatcaagagtgtagaagaataaatactgttttactgtccaaagacatgtttatagtgctctgtaaatgttcctttcctttgtagtctctggcaagatgctttaggaagataaaagtttgaggagaacaaacaggaattctgaattaagcacagagttgaagtttatacccgtttcacatgcttttcaagaatgtcgcaattactaagaagcagataatggtgttttttagaaacctaattgaagtatattcaaccaaatactttaatgtataaaataaatattatacaatatacttgtatagcagtttctgcttcacatttgattttttcaaatttaatatttatattagagatctatatatgtataaatatgtattttgtcaaatttgttacttaaatatatagagaccagttttctctggaagtttgtttaaatgacagaagcgtatatgaattcaagaaaatttaagctgcaaaaatgtatttgctataaaatgagaagtctcactgatagaggttctttattgctcattttttaaaaaatggactcttgaaatctgttaaaataaaattgtacatttggagatgtttca

SEQ ID NO: 491 - DNA, 3328 bp, Homo sapiens
cggctcgggccacgcccacctgtcctgcagcactggatgctttgtgagttggggattgttgcgtcccatatctggacccagaagggacttccctgctcggctggctctcggtttctctgctttcctccggagaaataacagcgtcttccgcgccgcgcatggagcctcccggccgccgcgagtgtccctttccttcctggcgctttcctgggttgcttctggcggccatggtgttgctgctgtactccttctccgatgcctgtgaggagccaccaacatttgaagctatggagctcattggtaaaccaaaaccctactatgagattggtgaacgagtagattataagtgtaaaaaaggatacttctatatacctcctcttgccacccatactatttgtgatcggaatcatacatggctacctgtctcagatgacgcctgttatagagaaacatgtccatatatacgggatcctttaaatggccaagcagtccctgcaaatgggacttacgagtttggttatcagatgcactttatttgtaatgagggttattacttaattggtgaagaaattctatattgtgaacttaaaggatcagtagcaatttggagcggtaagcccccaatatgtgaaaaggttttgtgtacaccacctccaaaaataaaaaatggaaaacacacctttagtgaagtagaagtatttgagtatcttgatgcagtaacttatagttgtgatcctgcacctggaccagatccattttcacttattggagagagcacgatttattgtggtgacaattcagtgtggagtcgtgctgctccagagtgtaaagtggtcaaatgtcgatttccagtagtcgaaaatggaaaacagatatcaggatttggaaaaaaattttactacaaagcaacagttatgtttgaatgcgataagggtttttacctcgatggcagcgacacaattgtctgtgacagtaacagtacttgggatcccccagttccaaagtgtcttaaagtgtcgacttcttccactacaaaatctccagcgtccagtgcctcaggtcctaggcctacttacaagcctccagtctcaaattatccaggatatcctaaacctgaggaaggaatacttgacagtttggatgtttgggtcattgctgtgattgttattgccatagttgttggagttgcagtaatttgtgttgtcccgtacagatatcttcaaaggaggaagaagaaaggcacatacctaactgatgagacccacagagaagtaaaatttacttctctctgagaaggagagatgagagaaaggtttgcttttatcattaaaaggaaagcagatggtggagctgaatatgccacttaccagactaaatcaaccactccagcagagcagagaggctgaatagattccacaacctggtttgccagttcatcttttgactctattaaaatcttcaatagttgttattctgtagtttcactctcatgagtgcaactgtggcttagctaatattgcaatgtggcttgaatgtaggtagcatcctttgatgcttctttgaaacttgtatgaatttgggtatgaacagattgcctgctttcccttaaataacacttagatttattggaccagtcagcacagcatgcctggttgtattaaagcagggatatgctgtattttataaaattggcaaaattagagaaatatagttcacaatgaaattatattttctttgtaaagaaagtggcttgaaatcttttttgttcaaagattaatgccaactcttaagattattctttcaccaactatagaatgtattttatatatcgttcattgtaaaaagcccttaaaaatatgtgtatactactttggctcttgtgcataaaaacaagaacactgaaaattgggaatatgcacaaacttggcttctttaaccaagaatattattggaaaattctctaaaagttaatagggtaaattctctattttttgtaatgtgttcggtgatttcagaaagctagaaagtgtatgtgtggcatttgttttcactttttaaaacatccctaactgatcgaatatatcagtaatttcagaatcagatgcatcctttcataagaagtgagaggactctgacagccataacaggagtgccacttcatggtgcgaagtgaacactgtagtcttgttgttttcccaaagagaactccgtatgttctcttaggttgagtaacccactctgaattctggttacatgtgtttttctctccctccttaaataaagagaggggttaaacatgccctctaaaagtaggtggttttgaagagaataaattcatcagataacctcaagtcacatgagaatcttagtccatttacattgccttggctagtaaaagccatctatgtatatgtcttacctcatctcctaaaaggcagagtacaaagtaagccatgtatctcaggaaggtaacttcattttgtctatttgctgttgattgtaccaagggatggaagaagtaaatatagctcaggtagcactttatactcaggcagatctcagccctctactgagtcccttagccaagcagtttctttcaaagaagccagcaggcgaaaagcagggactgccactgcatttcatatcacactgttaaaagttgtgttttgaaattttatgtttagttgcacaaattgggccaaagaaacattgccttgaggaagatatgattggaaaatcaagagtgtagaagaataaatactgttttactgtccaaagacatgtttatagtgctctgtaaatgttcctttcctttgtagtctctggcaagatgctttaggaagataaaagtttgaggagaacaaacaggaattctgaattaagcacagagttgaagtttatacccgtttcacatgcttttcaagaatgtcgcaattactaagaagcagataatggtgttttttagaaacctaattgaagtatattcaaccaaatactttaatgtataaaataaatattatacaatatacttgtatagcagtttctgcttcacatttgattttttcaaatttaatatttatattagagatctatatatgtataaatatgtattttgtcaaatttgttacttaaatatatagagaccagttttctctggaagtttgtttaaatgacagaagcgtatatgaattcaagaaaatttaagctgcaaaaatgtatttgctataaaatgagaagtctcactgatagaggttctttattgctcattttttaaaaaatggactcttgaaatctgttaaaataaaattgtacatttggagatgtttca

SEQ ID NO: 492 - DNA, 1314 bp, Homo sapiens
cttttcccggcacatgcgcaccgcagcgggtcgcgcgccctaaggagtggcactttttaaaagtgcagccggagaccagcctacagccgcctgcatctgtatccagcgccaggtcccgccagtcccagctgcgcgcgccccccagtcccgcacccgttcggcccaggctaagttagccctcaccatgccggtcaaaggaggcaccaagtgcatcaaatacctgctgttcggatttaacttcatcttctggcttgccgggattgctgtccttgccattggactatggctccgattcgactctcagaccaagagcatcttcgagcaagaaactaataataataattccagcttctacacaggagtctatattctgatcggagccggcgccctcatgatgctggtgggcttcctgggctgctgcggggctgtgcaggagtcccagtgcatgctgggactgttcttcggcttcctcttggtgatattcgccattgaaatagctgcggccatctggggatattcccacaaggatgaggtgattaaggaagtccaggagttttacaaggacacctacaacaagctgaaaaccaaggatgagccccagcgggaaacgctgaaagccatccactatgcgttgaactgctgtggtttggctgggggcgtggaacagtttatctcagacatctgccccaagaaggacgtactcgaaaccttcaccgtgaagtcctgtcctgatgccatcaaagaggtcttcgacaataaattccacatcatcggcgcagtgggcatcggcattgccgtggtcatgatatttggcatgatcttcagtatgatcttgtgctgtgctatccgcaggaaccgcgagatggtctagagtcagcttacatccctgagcaggaaagtttacccatgaagattggtgggattttttgtttgtttgttttgttttgtttgttgtttgttgtttgtttttttgccactaattttagtattcattctgcattgctagataaaagctgaagttactttatgtttgtcttttaatgcttcattcaatattgacatttgtagttgagcggggggtttggtttgctttggtttatattttttcagttgtttgtttttgcttgttatattaagcagaaatcctgcaatgaaaggtactatatttgctagactctagacaagatattgtacataaaagaatttttttgtctttaaatagatacaaatgtctatcaactttaatcaagttgtaacttatattgaagacaatttgatacataataaaaaattatgacaatgtcctggactggt

SEQ ID NO: 493 - DNA, 1566 bp, Homo sapiens
ctgcccagccctcagctgtgttattattcggtgataggtatttgctaattacttccaaaagcctcccatctgtcatcccacccagactgcgcgcttctaattcctcctaccccacatgctgtgcccaatgaaaagtatggtcagcgagcgaaggtttgcaaggagacagacgagggcgaaattaagccaggcggcttccctttaaatcctcgcaaagcagaagggcccctcactctggcagcaggccttggccaaggggcctttagccctgacgacccggggaagagtctcccaaagcagaacgcccggtccggcgcccagaccaaacgcgggggaaccggaagggcgaggcctccaccgccaggtcccgccagtcccagctgcgcgcgccccccagtcccgcacccgttcggcccaggctaagttagccctcaccatgccggtcaaaggaggcaccaagtgcatcaaatacctgctgttcggatttaacttcatcttctggcttgccgggattgctgtccttgccattggactatggctccgattcgactctcagaccaagagcatcttcgagcaagaaactaataataataattccagcttctacacaggagtctatattctgatcggagccggcgccctcatgatgctggtgggcttcctgggctgctgcggggctgtgcaggagtcccagtgcatgctgggactgttcttcggcttcctcttggtgatattcgccattgaaatagctgcggccatctggggatattcccacaaggatgaggtgattaaggaagtccaggagttttacaaggacacctacaacaagctgaaaaccaaggatgagccccagcgggaaacgctgaaagccatccactatgcgttgaactgctgtggtttggctgggggcgtggaacagtttatctcagacatctgccccaagaaggacgtactcgaaaccttcaccgtgaagtcctgtcctgatgccatcaaagaggtcttcgacaataaattccacatcatcggcgcagtgggcatcggcattgccgtggtcatgatatttggcatgatcttcagtatgatcttgtgctgtgctatccgcaggaaccgcgagatggtctagagtcagcttacatccctgagcaggaaagtttacccatgaagattggtgggattttttgtttgtttgttttgttttgtttgttgtttgttgtttgtttttttgccactaattttagtattcattctgcattgctagataaaagctgaagttactttatgtttgtcttttaatgcttcattcaatattgacatttgtagttgagcggggggtttggtttgctttggtttatattttttcagttgtttgtttttgcttgttatattaagcagaaatcctgcaatgaaaggtactatatttgctagactctagacaagatattgtacataaaagaatttttttgtctttaaatagatacaaatgtctatcaactttaatcaagttgtaacttatattgaagacaatttgatacataataaaaaattatgacaatgtcctggactggt

SEQ ID NO: 494 - DNA, 1208 bp, Homo sapiens
cgccaggtcccgccagtcccagctgcgcgcgccccccagtcccgcacccgttcggcccaggctaagttagccctcaccatgccggtcaaaggaggcaccaagtgcatcaaatacctgctgttcggatttaacttcatcttctggcttgccgggattgctgtccttgccattggactatggctccgattcgactctcagaccaagagcatcttcgagcaagaaactaataataataattccagcttctacacaggagtctatattctgatcggagccggcgccctcatgatgctggtgggcttcctgggctgctgcggggctgtgcaggagtcccagtgcatgctgggactgttcttcggcttcctcttggtgatattcgccattgaaatagctgcggccatctggggatattcccacaaggatgaggtgattaaggaagtccaggagttttacaaggacacctacaacaagctgaaaaccaaggatgagccccagcgggaaacgctgaaagccatccactatgcgttgaactgctgtggtttggctgggggcgtggaacagtttatctcagacatctgccccaagaaggacgtactcgaaaccttcaccgtgaagtcctgtcctgatgccatcaaagaggtcttcgacaataaattccacatcatcggcgcagtgggcatcggcattgccgtggtcatgatatttggcatgatcttcagtatgatcttgtgctgtgctatccgcaggaaccgcgagatggtctagagtcagcttacatccctgagcaggaaagtttacccatgaagattggtgggattttttgtttgtttgttttgttttgtttgttgtttgttgtttgtttttttgccactaattttagtattcattctgcattgctagataaaagctgaagttactttatgtttgtcttttaatgcttcattcaatattgacatttgtagttgagcggggggtttggtttgctttggtttatattttttcagttgtttgtttttgcttgttatattaagcagaaatcctgcaatgaaaggtactatatttgctagactctagacaagatattgtacataaaagaatttttttgtctttaaatagatacaaatgtctatcaactttaatcaagttgtaacttatattgaagacaatttgatacataataaaaaattatgacaatgtcctggactggt

SEQ ID NO: 495 - DNA, 1500 bp, Homo sapiens
ctgcccagccctcagctgtgttattattcggtgataggtatttgctaattacttccaaaagcctcccatctgtcatcccacccagactgcgcgcttctaattcctcctaccccacatgctgtgcccaatgaaaagtatggtcagcgagcgaaggtttgcaaggagacagacgagggcgaaattaagccaggcggcttccctttaaatcctcgcaaagcagaagggcccctcactctggcagcaggccttggccaaggggcctttagccctgacgacccggggaagagtctcccaaagcagaacgcccggtccggcgcccagaccaaacgcgggggaaccggaagggcgaggcctccaccgccaggtcccgccagtcccagctgcgcgcgccccccagtcccgcacccgttcggcccaggctaagttagccctcaccatgccggtcaaaggaggcaccaagtgcatcaaatacctgctgttcggatttaacttcatcttctggcttgccgggattgctgtccttgccattggactatggctccgattcgactctcagaccaagagcatcttcgagcaagaaactaataataataattccagcttctacacaggagtctatattctgatcggagccggcgccctcatgatgctggtgggcttcctgggctgctgcggggctgtgcaggagtcccagtgcatgctgggactgttcttcggcttcctcttggtgatattcgccattgaaatagctgcggccatctggggatattcccacaaggatgaggtgattaaggaagtccaggagttttacaaggacacctacaacaagctgaaaaccaaggatgagccccagcgggaaacgctgaaagccatccactatgcgttgaactgctgtggtttggctgggggcgtggaacagtttatctcagacatctgccccaagaaggacgtactcgaaaccttcaccgtgaagtcctgtcctgatgccatcaaagaggtcttcgacaataaattccacatcatcggcgcagtgggcatcggcattgccgtggtcatgatatttggcatgatcttcagtatgatcttgtgctgtgctatccgcaggaaccgcgagatggtctagattgtttgtttgttttgttttgtttgttgtttgttgtttgtttttttgccactaattttagtattcattctgcattgctagataaaagctgaagttactttatgtttgtcttttaatgcttcattcaatattgacatttgtagttgagcggggggtttggtttgctttggtttatattttttcagttgtttgtttttgcttgttatattaagcagaaatcctgcaatgaaaggtactatatttgctagactctagacaagatattgtacataaaagaatttttttgtctttaaatagatacaaatgtctatcaactttaatcaagttgtaacttatattgaagacaatttgatacataataaaaaattatgacaatg

SEQ ID NO: 496 - DNA, 2644 bp, Homo sapiens
ccgacctcagcgccccctcgcgagcgcctgccgtttctcggggcgggacgggggggcggggactgggcggagaggcgcgtgctgctgcgtgcgtgcgcgcgcgccgcgggcgggccagtgaaaccggcggccctggcacgtgacctaggaccggctcaccgggtcgcttggtggctccgtctgtctgtccgtccgcccgcgggtgccatcatggcggacgcggccagtcaggtgctcctgggctccggtctcaccatcctgtcccagccgctcatgtacgtgaaagtgctcatccaggtgggatatgagcctcttcctccaacaataggacgaaatatttttgggcggcaagtgtgtcagcttcctggtctctttagttatgctcagcacattgccagtatcgatgggaggcgcgggttgttcacaggcttaactccaagactgtgttcgggagtccttggaactgtggtccatggtaaagttttacagcattaccaggagagtgacaagggtgaggagttaggacctggaaatgtacagaaagaagtctcatcttcctttgaccacgttatcaaggagacaactcgagagatgatcgctcgttctgctgctaccctcatcacacatcccttccatgtgatcactctgagatctatggtacagttcattggcagagaatccaagtactgtggactttgtgattccataataaccatctatcgggaagagggcattctaggatttttcgcgggtcttgttcctcgccttctaggtgacatcctttctttgtggctgtgtaactcactggcctacctcgtcaatacctatgcactggacagtggggtttctaccatgaatgaaatgaagagttattctcaagctgtcacaggattttttgcgagtatgttgacctatccctttgtgcttgtctccaatcttatggctgtcaacaactgtggtcttgctggtggatgccctccttactccccaatatatacgtcttggatagactgttggtgcatgctacaaaaagaggggaatatgagccgaggaaatagcttatttttccggaaggtcccctttgggaagacttattgttgtgacctgaaaatgttaatttgaagatgtggggcagggacagtgacatttctgtagtcccagatgcacagaattatgggagagaatgttgatttctatacagtgtggcgcgcttttttaataatcatttaatcttgggaaaattcaggtgtttggtgtctgccttttttgttcttttttccagcacaacataacttaccactgatactccccctttagttattctgaattaggatatttttgctccaaattcttattttacttaaccagaagggaaaaaaagttgtattttcctgaagctacaggcactttgtcatgtgatttttgagtctcaatttaaggctttgtaaaatgaagagtagaattccaagaaaaatgagaaataattttgtaaaacttaacaaaatcactaaattaaactatatgggaggttatgaattactttttcttgggtagaccctaaaatgtcagtagcatgcaccagaatctgactcccattatgcttctaagcacatttcattgaccttgtctctcatacttcaagaaaaggacagtacattgctacattaccctagaaagtctgtgtgaggatctgccccttcagtctgttattgcaaagtaataaaatgtcacctacagggagcctctgagcctactctagttcaagaggctacctgaaaaaaaataaataagataaagggtcagcaacaacaaagaaaaagacaattacagaaaataagcaagatttggaaaggaagtataatggcacttttttcctcaaaggaagttcttgttttcacataaaatatgaaaagcagatcctgcaggagtaacccccttctttaagagccaagtatttgccagtgcttaaattacaccataccgttctaattatatataatcttttgttcttcagttttttgttttgtttcctttttgttattgttgccgaaggtgagtagttttgcatttctgatgacagccttggaaagtatatttgtaactccatgtctggtaatgccaacccaagtcgacatgggtcttaggacactgaccacctcacatgccataccctcagttaagcatgttaacatttataggaggaaaaaaatcactttgggagaaaataaaattcaactcaagcataaagcttctgtttactcaggccttctaaaaagcaggttaaaatgctctaaaatgagaaagcctgtggtttcacttatttatataactcactgggacattgccaaatgagtaagcacttaattcgctgcttctgagacttctctgtcaaaacagccccactgataatattagacagaacgagaatgcaggggtctcttccctcccctggggtttaggaagctcatgaggagctcggcttaaaatgtctttgatgtctcttcctttgtctcaaaaagtaatgtcaattttatatactatttcaatattactatctgcatttgttttaatataaaaatgtttgctgcctacctttttctcccaaaaaatctttaagtaaagatgatctgggaaaatgtgccat

SEQ ID NO: 497 - DNA, 1216 bp, Homo sapiens
cagtgccattcccttcacttgatatctgtttactttagaggaggcagtttttgagaaaggatcataaatatcctggcccagtgccccaggagctatgacaagcaaaggaacatacttgcctggagatagcctttgcgatatttaaatgtccgtggatacagaaatctctgcaggcaagttgctccagagcatattgcaggacaagcctgtaacgaatagttaaattcacggcatctggattcctaatccttttccgaaatggcaggtgtgagtgcctgtataaaatattctatgtttaccttcaacttcttgttctggctatgtggtatcttgatcctagcattagcaatatgggtacgagtaagcaatgactctcaagcaatttttggttctgaagatgtaggctctagctcctacgttgctgtggacatattgattgctgtaggtgccatcatcatgattctgggcttcctgggatgctgcggtgctataaaagaaagtcgctgcatgcttctgttgtttttcataggcttgcttctgatcctgctcctgcaggtggcgacaggtatcctaggagctgttttcaaatctaagtctgatcgcattgtgaatgaaactctctatgaaaacacaaagcttttgagcgccacaggggaaagtgaaaaacaattccaggaagccataattgtgtttcaagaagagtttaaatgctgcggtttggtcaatggagctgctgattggggaaataattttcaacactatcctgaattatgtgcctgtctagataagcagagaccatgccaaagctataatggaaaacaagtttacaaagagacctgtatttctttcataaaagacttcttggcaaaaaatttgattatagttattggaatatcatttggactggcagttattgagatactgggtttggtgttttctatggtcctgtattgccagatcgggaacaaatgaatctgtggatgcatcaacctatcgtcagtcaaacccctttaaaatgttgctttggctttgtaaatttaaatatgtaagtgctatataagtcaggagcagctgtctttttaaaatgtctcggctagctagaccacagatatcttctagacatattgaacacatttaagatttgagggatataagggaaaatgatatgaatgtgtatttttactcaaaataaaagtaactgtttacgttggtgctt

SEQ ID NO: 498 - DNA, 1198 bp, Homo sapiens
acttgatatctgtttactttagaggaggcagtttttgagaaaggatcataaatatcctggcccagtgccccaggagctatgacaagcaaaggaacatacttgcctggagatagcctttgcgatatttaaatccgtggatacagaaatctctgcaggcaagttgctccagagcatattgcaggacaagcctgtaacgaatagttaaattcacggcatctggattcctaatccttttccgaaatggcaggtgtgagtgcctgtataaaatattctatgtttaccttcaacttcttgttctggctatgtggtatcttgatcctagcattagcaatatgggtacgagtaagcaatgactctcaagcaatttttggttctgaagatgtaggctctagctcctacgttgctgtggacatattgattgctgtaggtgccatcatcatgattctgggcttcctgggatgctgcggtgctataaaagaaagtcgctgcatgcttctgttgtttttcataggcttgcttctgatcctgctcctgcaggtggcgacaggtatcctaggagctgttttcaaatctaagtctgatcgcattgtgaatgaaactctctatgaaaacacaaagcttttgagcgccacaggggaaagtgaaaaacaattccaggaagccataattgtgtttcaagaagagtttaaatgctgcggtttggtcaatggagctgctgattggggaaataattttcaacactatcctgaattatgtgcctgtctagataagcagagaccatgccaaagctataatggaaaacaagtttacaaagagacctgtatttctttcataaaagacttcttggcaaaaaatttgattatagttattggaatatcatttggactggcagttattgagatactgggtttggtgttttctatggtcctgtattgccagatcgggaacaaatgaatctgtggatgcatcaacctatcgtcagtcaaacccctttaaaatgttgctttggctttgtaaatttaaatatgtaagtgctatataagtcaggagcagctgtctttttaaaatgtctcggctagctagaccacagatatcttctagacatattgaacacatttaagatttgagggatataagggaaaatgatatgaatgtgtatttttactcaaaataaaagtaactgtttacgttggtgctt

SEQ ID NO: 499 - DNA, 1067 bp, Homo sapiens
ccgtggatacagaaatctctgcaggcaagttgctccagagcatattgcaggacaagcctgtaacgaatagttaaattcacggcatctggattcctaatccttttccgaaatggcaggtgtgagtgcctgtataaaatattctatgtttaccttcaacttcttgttctggctatgtggtatcttgatcctagcattagcaatatgggtacgagtaagcaatgactctcaagcaatttttggttctgaagatgtaggctctagctcctacgttgctgtggacatattgattgctgtaggtgccatcatcatgattctgggcttcctgggatgctgcggtgctataaaagaaagtcgctgcatgcttctgttgtttttcataggcttgcttctgatcctgctcctgcaggtggcgacaggtatcctaggagctgttttcaaatctaagtctgatcgcattgtgaatgaaactctctatgaaaacacaaagcttttgagcgccacaggggaaagtgaaaaacaattccaggaagccataattgtgtttcaagaagagtttaaatgctgcggtttggtcaatggagctgctgattggggaaataattttcaacactatcctgaattatgtgcctgtctagataagcagagaccatgccaaagctataatggaaaacaagtttacaaagagacctgtatttctttcataaaagacttcttggcaaaaaatttgattatagttattggaatatcatttggactggcagttattgagatactgggtttggtgttttctatggtcctgtattgccagatcgggaacaaatgaatctgtggatgcatcaacctatcgtcagtcaaacccctttaaaatgttgctttggctttgtaaatttaaatatgtaagtgctatataagtcaggagcagctgtctttttaaaatgtctcggctagctagaccacagatatcttctagacatattgaacacatttaagatttgagggatataagggaaaatgatatgaatgtgtatttttactcaaaataaaagtaactgtttacgttggtgctt

SEQ ID NO: 500 - DNA, 4898 bp, Homo sapiens
acgcggttctccctgatcccggagctgggctcagggctcggactcagtcctgcagcgcctctaggctgcggatccgcgcttcaaccacctgctttgcgctgcgtccggggaagtggggaggagacgggagggagggaggaggcggggagaggaggaaagaggcagcttacacacgccttccagtccctctactcagagcagcccggagaccgctgccgccgctgccgctgctaccaccgctgccacctgaggagacccgccgcccccccgtcgccgcctcctgcgagtccttcttagcacctggcgtttcatgcacattgccactgccattattattatcattccaatacaaggaaaataaaagaagataccagcgaaaagaaccgcttacacctttccgaattactcaagtgtctcctggaaacagagggtcgttgtccccggaggagcagccgaagggcccgtgggctggtgttgaccgggagggaggaggagttgggggcattgcgtggtggaaagttgcgtgcggcagagaaccgaaggtgcagcgccacagcccaggggacggtgtgtctgggagaagacgctgcccctgcgtcgggacccgccagcgcgcgggcaccgcggggcccgggacgacgccccctcctgcggcgtggactccgtcagtggcccaccaagaaggaggaggaatatggaatccaagggggccagttcctgccgtctgctcttctgcctcttgatctccgccaccgtcttcaggccaggccttggatggtatactgtaaattcagcatatggagataccattatcataccttgccgacttgacgtacctcagaatctcatgtttggcaaatggaaatatgaaaagcccgatggctccccagtatttattgccttcagatcctctacaaagaaaagtgtgcagtacgacgatgtaccagaatacaaagacagattgaacctctcagaaaactacactttgtctatcagtaatgcaaggatcagtgatgaaaagagatttgtgtgcatgctagtaactgaggacaacgtgtttgaggcacctacaatagtcaaggtgttcaagcaaccatctaaacctgaaattgtaagcaaagcactgtttctcgaaacagagcagctaaaaaagttgggtgactgcatttcagaagacagttatccagatggcaatatcacatggtacaggaatggaaaagtgctacatccccttgaaggagcggtggtcataatttttaaaaaggaaatggacccagtgactcagctctataccatgacttccaccctggagtacaagacaaccaaggctgacatacaaatgccattcacctgctcggtgacatattatggaccatctggccagaaaacaattcattctgaacaggcagtatttgatatttactatcctacagagcaggtgacaatacaagtgctgccaccaaaaaatgccatcaaagaaggggataacatcactcttaaatgcttagggaatggcaaccctcccccagaggaatttttgttttacttaccaggacagcccgaaggaataagaagctcaaatacttacacactaacggatgtgaggcgcaatgcaacaggagactacaagtgttccctgatagacaaaaaaagcatgattgcttcaacagccatcacagttcactatttggatttgtccttaaacccaagtggagaagtgactagacagattggtgatgccctacccgtgtcatgcacaatatctgctagcaggaatgcaactgtggtatggatgaaagataacatcaggcttcgatctagcccgtcattttctagtcttcattatcaggatgctggaaactatgtctgcgaaactgctctgcaggaggttgaaggactaaagaaaagagagtcattgactctcattgtagaaggcaaacctcaaataaaaatgacaaagaaaactgatcccagtggactatctaaaacaataatctgccatgtggaaggttttccaaagccagccattcaatggacaattactggcagtggaagcgtcataaaccaagcaaaggaatctccttatattaatggcaggtattatagtaaaattatcatttcccctgaagagaatgttacattaacttgcacagcagaaaaccaactggagagaacagtaaactccttgaatgtctctgctataagtattccagaacacgatgaggcagacgagataagtgatgaaaacagagaaaaggtgaatgaccaggcaaaactaattgtgggaatcgttgttggtctcctccttgctgcccttgttgctggtgtcgtctactggctgtacatgaagaagtcaaagactgcatcaaaacatgtaaacaaggacctcggtaatatggaagaaaacaaaaagttagaagaaaacaatcacaaaactgaagcctaagagagaaactgtcctagttgtccagagataaaaatcatatagaccaattgaagcatgaacgtggattgtatttaagacataaacaaagacattgacagcaattcatggttcaagtattaagcagttcattctaccaagctgtcacaggttttcagagaattatctcaagtaaaacaaatgaaatttaattacaaacaataagaacaagttttggcagccatgataataggtcatatgttgtgtttggttcaattttttttccgtaaatgtctgcactgaggatttctttttggtttgccttttatgtaaattttttacgtagctatttttatacactgtaagctttgttctgggagttgctgttaatctgatgtataatgtaatgtttttatttcaattgtttatatggataatctgagcaggtacatttctgattctgattgctatcagcaatgccccaaactttctcataagcacctaaaacccaaaggtggcagcttgtgaagattggggacactcatattgccctaattaaaaactgtgatttttatcacaagggaggggaggccgagagtcagactgatagacaccataggagccgactctttgatatgccaccagcgaactctcagaaataaatcacagatgcatatagacacacatacataatggtactcccaaactgacaattttacctattctgaaaaagacataaaacagaatttggtagcacttacctctacagacacctgctaataaattattttctgtcaaaagaaaaaacacaagcatgtgtgagagacagtttggaaaaatcatggtcaacattcccattttcatagatcacaatgtaaatcactataattacaaattggtgttaaatcctttgggttatccactgccttaaaattatacctatttcatgtttaaaaagatatcaatcagaattggagtttttaacagtggtcattatcaaagctgtgttattttccacagaatatagaatatatatttttttcgtgtgtgtttttgttaactaccctacagatattgaatgcaccttgagataatttagtgtttttaactgatacataatttatcaagcagtacatgaaagtgtaataataaaatgtctatgtatctttagttacattcaaatttgtaactttataaacatgttttatgcttgaggaaatttttaaggtggtagtataaatggaaactttttgaagtagaccagatatgggctacttgtgactagacttttaaactttgctctttcaagcagaagcctggtttctgggagaacactgcacagcgatttctttcccaggatttacacaactttaaagggaagataaatgaacatcagatttctaggtatagaactatgttattgaaaggaaaaggaaaactggtgtttgtttcttagactcatgaaataaaaaattatgaaggcaatgaaaaataaattgaaaattaaagtcagatgagaataggaataatactttgccacttctgcattatttagaaacatacgttattgtacatttgtaaaccatttactgtctgggcaatagtgactccgtttaataaaagcttccgtagtgcattggtatggattaaatgcataaaatattcttagactcgatgctgtataaaatattatgggaaaaaaagaaaatacgttattttgcctctaaacttttattgaagttttatttggcaggaaaaaaaattgaatcttggtcaacatttaaaccaaagtaaaaggggaaaaaccaaagttatttgttttgcatggctaagccattctgttatctctgtaaatactgtgatttcttttttattttctctttagaattttgttaaagaaattctaaaatttttaaacacctgctctccacaataaatcacaaacactaaaataaaattacttccatataaatattattttctcttttggtgtgggagatcaaaggtttaaagtctaacttctaagatatatttgcagaaagaagcaacatgacaatagagagagttatgctacaattatttcttggtttccacttgcaatggttaattaagtccaaaaacagctgtcagaacctcgagagcagaacatgagaaactcagagctctggaccgaaagcagaaagtttgccgggaaaaaaaaagacaacattattaccatcgattcagtgcctggataaagaggaaagcttacttgtttaatggcagccacatgcacgaagatgctaagaagaaaaagaattccaaatcctcaacttttgaggtttcggctctccaatttaactctttggcaacaggaaacaggttttgcaagttcaaggttcactccctatatgtgattataggaattgtttgtggaaatggattaacatacccgtctatgcctaaaagataataaaactgaaatatgtcttcacag

SEQ ID NO: 501 - DNA, 4177 bp, Homo sapiens
gttctctctctctttctctcttcttccttttttttttcccccaaaggccttggatggtatactgtaaattcagcatatggagataccattatcataccttgccgacttgacgtacctcagaatctcatgtttggcaaatggaaatatgaaaagcccgatggctccccagtatttattgccttcagatcctctacaaagaaaagtgtgcagtacgacgatgtaccagaatacaaagacagattgaacctctcagaaaactacactttgtctatcagtaatgcaaggatcagtgatgaaaagagatttgtgtgcatgctagtaactgaggacaacgtgtttgaggcacctacaatagtcaaggtgttcaagcaaccatctaaacctgaaattgtaagcaaagcactgtttctcgaaacagagcagctaaaaaagttgggtgactgcatttcagaagacagttatccagatggcaatatcacatggtacaggaatggaaaagtgctacatccccttgaaggagcggtggtcataatttttaaaaaggaaatggacccagtgactcagctctataccatgacttccaccctggagtacaagacaaccaaggctgacatacaaatgccattcacctgctcggtgacatattatggaccatctggccagaaaacaattcattctgaacaggcagtatttgatatttactatcctacagagcaggtgacaatacaagtgctgccaccaaaaaatgccatcaaagaaggggataacatcactcttaaatgcttagggaatggcaaccctcccccagaggaatttttgttttacttaccaggacagcccgaaggaataagaagctcaaatacttacacactaacggatgtgaggcgcaatgcaacaggagactacaagtgttccctgatagacaaaaaaagcatgattgcttcaacagccatcacagttcactatttggatttgtccttaaacccaagtggagaagtgactagacagattggtgatgccctacccgtgtcatgcacaatatctgctagcaggaatgcaactgtggtatggatgaaagataacatcaggcttcgatctagcccgtcattttctagtcttcattatcaggatgctggaaactatgtctgcgaaactgctctgcaggaggttgaaggactaaagaaaagagagtcattgactctcattgtagaaggcaaacctcaaataaaaatgacaaagaaaactgatcccagtggactatctaaaacaataatctgccatgtggaaggttttccaaagccagccattcaatggacaattactggcagtggaagcgtcataaaccaagcaaaggaatctccttatattaatggcaggtattatagtaaaattatcatttcccctgaagagaatgttacattaacttgcacagcagaaaaccaactggagagaacagtaaactccttgaatgtctctgctataagtattccagaacacgatgaggcagacgagataagtgatgaaaacagagaaaaggtgaatgaccaggcaaaactaattgtgggaatcgttgttggtctcctccttgctgcccttgttgctggtgtcgtctactggctgtacatgaagaagtcaaagactgcatcaaaacatgtaaacaaggacctcggtaatatggaagaaaacaaaaagttagaagaaaacaatcacaaaactgaagcctaagagagaaactgtcctagttgtccagagataaaaatcatatagaccaattgaagcatgaacgtggattgtatttaagacataaacaaagacattgacagcaattcatggttcaagtattaagcagttcattctaccaagctgtcacaggttttcagagaattatctcaagtaaaacaaatgaaatttaattacaaacaataagaacaagttttggcagccatgataataggtcatatgttgtgtttggttcaattttttttccgtaaatgtctgcactgaggatttctttttggtttgccttttatgtaaattttttacgtagctatttttatacactgtaagctttgttctgggagttgctgttaatctgatgtataatgtaatgtttttatttcaattgtttatatggataatctgagcaggtacatttctgattctgattgctatcagcaatgccccaaactttctcataagcacctaaaacccaaaggtggcagcttgtgaagattggggacactcatattgccctaattaaaaactgtgatttttatcacaagggaggggaggccgagagtcagactgatagacaccataggagccgactctttgatatgccaccagcgaactctcagaaataaatcacagatgcatatagacacacatacataatggtactcccaaactgacaattttacctattctgaaaaagacataaaacagaatttggtagcacttacctctacagacacctgctaataaattattttctgtcaaaagaaaaaacacaagcatgtgtgagagacagtttggaaaaatcatggtcaacattcccattttcatagatcacaatgtaaatcactataattacaaattggtgttaaatcctttgggttatccactgccttaaaattatacctatttcatgtttaaaaagatatcaatcagaattggagtttttaacagtggtcattatcaaagctgtgttattttccacagaatatagaatatatatttttttcgtgtgtgtttttgttaactaccctacagatattgaatgcaccttgagataatttagtgtttttaactgatacataatttatcaagcagtacatgaaagtgtaataataaaatgtctatgtatctttagttacattcaaatttgtaactttataaacatgttttatgcttgaggaaatttttaaggtggtagtataaatggaaactttttgaagtagaccagatatgggctacttgtgactagacttttaaactttgctctttcaagcagaagcctggtttctgggagaacactgcacagcgatttctttcccaggatttacacaactttaaagggaagataaatgaacatcagatttctaggtatagaactatgttattgaaaggaaaaggaaaactggtgtttgtttcttagactcatgaaataaaaaattatgaaggcaatgaaaaataaattgaaaattaaagtcagatgagaataggaataatactttgccacttctgcattatttagaaacatacgttattgtacatttgtaaaccatttactgtctgggcaatagtgactccgtttaataaaagcttccgtagtgcattggtatggattaaatgcataaaatattcttagactcgatgctgtataaaatattatgggaaaaaaagaaaatacgttattttgcctctaaacttttattgaagttttatttggcaggaaaaaaaattgaatcttggtcaacatttaaaccaaagtaaaaggggaaaaaccaaagttatttgttttgcatggctaagccattctgttatctctgtaaatactgtgatttcttttttattttctctttagaattttgttaaagaaattctaaaatttttaaacacctgctctccacaataaatcacaaacactaaaataaaattacttccatataaatattattttctcttttggtgtgggagatcaaaggtttaaagtctaacttctaagatatatttgcagaaagaagcaacatgacaatagagagagttatgctacaattatttcttggtttccacttgcaatggttaattaagtccaaaaacagctgtcagaacctcgagagcagaacatgagaaactcagagctctggaccgaaagcagaaagtttgccgggaaaaaaaaagacaacattattaccatcgattcagtgcctggataaagaggaaagcttacttgtttaatggcagccacatgcacgaagatgctaagaagaaaaagaattccaaatcctcaacttttgaggtttcggctctccaatttaactctttggcaacaggaaacaggttttgcaagttcaaggttcactccctatatgtgattataggaattgtttgtggaaatggattaacatacccgtctatgcctaaaagataataaaactgaaatatgtcttcacag

SEQ ID NO: 502 - DNA, 4859 bp, Homo sapiens
acgcggttctccctgatcccggagctgggctcagggctcggactcagtcctgcagcgcctctaggctgcggatccgcgcttcaaccacctgctttgcgctgcgtccggggaagtggggaggagacgggagggagggaggaggcggggagaggaggaaagaggcagcttacacacgccttccagtccctctactcagagcagcccggagaccgctgccgccgctgccgctgctaccaccgctgccacctgaggagacccgccgcccccccgtcgccgcctcctgcgagtccttcttagcacctggcgtttcatgcacattgccactgccattattattatcattccaatacaaggaaaataaaagaagataccagcgaaaagaaccgcttacacctttccgaattactcaagtgtctcctggaaacagagggtcgttgtccccggaggagcagccgaagggcccgtgggctggtgttgaccgggagggaggaggagttgggggcattgcgtggtggaaagttgcgtgcggcagagaaccgaaggtgcagcgccacagcccaggggacggtgtgtctgggagaagacgctgcccctgcgtcgggacccgccagcgcgcgggcaccgcggggcccgggacgacgccccctcctgcggcgtggactccgtcagtggcccaccaagaaggaggaggaatatggaatccaagggggccagttcctgccgtctgctcttctgcctcttgatctccgccaccgtcttcaggccaggccttggatggtatactgtaaattcagcatatggagataccattatcataccttgccgacttgacgtacctcagaatctcatgtttggcaaatggaaatatgaaaagcccgatggctccccagtatttattgccttcagatcctctacaaagaaaagtgtgcagtacgacgatgtaccagaatacaaagacagattgaacctctcagaaaactacactttgtctatcagtaatgcaaggatcagtgatgaaaagagatttgtgtgcatgctagtaactgaggacaacgtgtttgaggcacctacaatagtcaaggtgttcaagcaaccatctaaacctgaaattgtaagcaaagcactgtttctcgaaacagagcagctaaaaaagttgggtgactgcatttcagaagacagttatccagatggcaatatcacatggtacaggaatggaaaagtgctacatccccttgaaggagcggtggtcataatttttaaaaaggaaatggacccagtgactcagctctataccatgacttccaccctggagtacaagacaaccaaggctgacatacaaatgccattcacctgctcggtgacatattatggaccatctggccagaaaacaattcattctgaacaggcagtatttgatatttactatcctacagagcaggtgacaatacaagtgctgccaccaaaaaatgccatcaaagaaggggataacatcactcttaaatgcttagggaatggcaaccctcccccagaggaatttttgttttacttaccaggacagcccgaaggaataagaagctcaaatacttacacactaacggatgtgaggcgcaatgcaacaggagactacaagtgttccctgatagacaaaaaaagcatgattgcttcaacagccatcacagttcactatttggatttgtccttaaacccaagtggagaagtgactagacagattggtgatgccctacccgtgtcatgcacaatatctgctagcaggaatgcaactgtggtatggatgaaagataacatcaggcttcgatctagcccgtcattttctagtcttcattatcaggatgctggaaactatgtctgcgaaactgctctgcaggaggttgaaggactaaagaaaagagagtcattgactctcattgtagaaggcaaacctcaaataaaaatgacaaagaaaactgatcccagtggactatctaaaacaataatctgccatgtggaaggttttccaaagccagccattcaatggacaattactggcagtggaagcgtcataaaccaagcaaaggaatctccttatattaatggcaggtattatagtaaaattatcatttcccctgaagagaatgttacattaacttgcacagcagaaaaccaactggagagaacagtaaactccttgaatgtctctgctaatgaaaacagagaaaaggtgaatgaccaggcaaaactaattgtgggaatcgttgttggtctcctccttgctgcccttgttgctggtgtcgtctactggctgtacatgaagaagtcaaagactgcatcaaaacatgtaaacaaggacctcggtaatatggaagaaaacaaaaagttagaagaaaacaatcacaaaactgaagcctaagagagaaactgtcctagttgtccagagataaaaatcatatagaccaattgaagcatgaacgtggattgtatttaagacataaacaaagacattgacagcaattcatggttcaagtattaagcagttcattctaccaagctgtcacaggttttcagagaattatctcaagtaaaacaaatgaaatttaattacaaacaataagaacaagttttggcagccatgataataggtcatatgttgtgtttggttcaattttttttccgtaaatgtctgcactgaggatttctttttggtttgccttttatgtaaattttttacgtagctatttttatacactgtaagctttgttctgggagttgctgttaatctgatgtataatgtaatgtttttatttcaattgtttatatggataatctgagcaggtacatttctgattctgattgctatcagcaatgccccaaactttctcataagcacctaaaacccaaaggtggcagcttgtgaagattggggacactcatattgccctaattaaaaactgtgatttttatcacaagggaggggaggccgagagtcagactgatagacaccataggagccgactctttgatatgccaccagcgaactctcagaaataaatcacagatgcatatagacacacatacataatggtactcccaaactgacaattttacctattctgaaaaagacataaaacagaatttggtagcacttacctctacagacacctgctaataaattattttctgtcaaaagaaaaaacacaagcatgtgtgagagacagtttggaaaaatcatggtcaacattcccattttcatagatcacaatgtaaatcactataattacaaattggtgttaaatcctttgggttatccactgccttaaaattatacctatttcatgtttaaaaagatatcaatcagaattggagtttttaacagtggtcattatcaaagctgtgttattttccacagaatatagaatatatatttttttcgtgtgtgtttttgttaactaccctacagatattgaatgcaccttgagataatttagtgtttttaactgatacataatttatcaagcagtacatgaaagtgtaataataaaatgtctatgtatctttagttacattcaaatttgtaactttataaacatgttttatgcttgaggaaatttttaaggtggtagtataaatggaaactttttgaagtagaccagatatgggctacttgtgactagacttttaaactttgctctttcaagcagaagcctggtttctgggagaacactgcacagcgatttctttcccaggatttacacaactttaaagggaagataaatgaacatcagatttctaggtatagaactatgttattgaaaggaaaaggaaaactggtgtttgtttcttagactcatgaaataaaaaattatgaaggcaatgaaaaataaattgaaaattaaagtcagatgagaataggaataatactttgccacttctgcattatttagaaacatacgttattgtacatttgtaaaccatttactgtctgggcaatagtgactccgtttaataaaagcttccgtagtgcattggtatggattaaatgcataaaatattcttagactcgatgctgtataaaatattatgggaaaaaaagaaaatacgttattttgcctctaaacttttattgaagttttatttggcaggaaaaaaaattgaatcttggtcaacatttaaaccaaagtaaaaggggaaaaaccaaagttatttgttttgcatggctaagccattctgttatctctgtaaatactgtgatttcttttttattttctctttagaattttgttaaagaaattctaaaatttttaaacacctgctctccacaataaatcacaaacactaaaataaaattacttccatataaatattattttctcttttggtgtgggagatcaaaggtttaaagtctaacttctaagatatatttgcagaaagaagcaacatgacaatagagagagttatgctacaattatttcttggtttccacttgcaatggttaattaagtccaaaaacagctgtcagaacctcgagagcagaacatgagaaactcagagctctggaccgaaagcagaaagtttgccgggaaaaaaaaagacaacattattaccatcgattcagtgcctggataaagaggaaagcttacttgtttaatggcagccacatgcacgaagatgctaagaagaaaaagaattccaaatcctcaacttttgaggtttcggctctccaatttaactctttggcaacaggaaacaggttttgcaagttcaaggttcactccctatatgtgattataggaattgtttgtggaaatggattaacatacccgtctatgcctaaaagataataaaactgaaatatgtcttcacag

SEQ ID NO: 503 - DNA, 2539 bp, Homo sapiens
cgggacgacgccccctcctgcggcgtggactccgtcagtggcccaccaagaaggaggaggaatatggaatccaagggggccagttcctgccgtctgctcttctgcctcttgatctccgccaccgtcttcaggccaggccttggatggtatactgtaaattcagcatatggagataccattatcataccttgccgacttgacgtacctcagaatctcatgtttggcaaatggaaatatgaaaagcccgatggctccccagtatttattgccttcagatcctctacaaagaaaagtgtgcagtacgacgatgtaccagaatacaaagacagattgaacctctcagaaaactacactttgtctatcagtaatgcaaggatcagtgatgaaaagagatttgtgtgcatgctagtaactgaggacaacgtgtttgaggcacctacaatagtcaaggtgttcaagcaaccatctaaacctgaaattgtaagcaaagcactgtttctcgaaacagagcagctaaaaaagttgggtgactgcatttcagaagacagttatccagatggcaatatcacatggtacaggaatggaaaagtgctacatccccttgaaggagcggtggtcataatttttaaaaaggaaatggacccagtgactcagctctataccatgacttccaccctggagtacaagacaaccaaggctgacatacaaatgccattcacctgctcggtgacatattatggaccatctggccagaaaacaattcattctgaacaggcagtatttgatatttactatcctacagagcaggtgacaatacaagtgctgccaccaaaaaatgccatcaaagaaggggataacatcactcttaaatgcttagggaatggcaaccctcccccagaggaatttttgttttacttaccaggacagcccgaaggaataagaagctcaaatacttacacactgatggatgtgaggcgcaatgcaacaggagactacaagtgttccctgatagacaaaaaaagcatgattgcttcaacagccatcacagttcactatttggatttgtccttaaacccaagtggagaagtgactagacagattggtgatgccctacccgtgtcatgcacaatatctgctagcaggaatgcaactgtggtatggatgaaagataacatcaggcttcgatctagcccgtcattttctagtcttcattatcaggatgctggaaactatgtctgcgaaactgctctgcaggaggttgaaggactaaagaaaagagagtcattgactctcattgtagaaggcaaacctcaaataaaaatgacaaagaaaactgatcccagtggactatctaaaacaataatctgccatgtggaaggttttccaaagccagccattcagtggacaattactggcagtggaagcgtcataaaccaaacagaggaatctccttatattaatggcaggtattatagtaaaattatcatttcccctgaagagaatgttacattaacttgcacagcagaaaaccaactggagagaacagtaaactccttgaatgtctctgctataagtattccagaacacgatgaggcagacgagataagtgatgaaaacagagaaaaggtgaatgaccaggcaaaactaattgtgggaatcgttgttggtctcctccttgctgcccttgttgctggtgtcgtctactggctgtacatgaagaagtcaaagactgcatcaaaacatgtaaacaaggacctcggtaatatggaagaaaacaaaaagttagaagaaaacaatcacaaaactgaagcctaagagagaaactgtcctagttgtccagagataaaaatcatatagaccaattgaagcatgaacgtggattgtatttaagacataaacaaagacattgacagcaattcatggttcaagtattaagcagttcattctaccaagctgtcacaggttttcagagaattatctcaagtaaaacaaatgaaatttaattacaaacaataagaacaagttttggcagccatgataataggtcatatgttgtgtttggttcaattttttttccgtaaatgtctgcactgaggatttctttttggtttgccttttatgtaaattttttacgtagctatttttatacactgtaagctttgttctgggagttgctgttaatctgatgtataatgtaatgtttttatttcaattgtttatatggataatctgagcaggtacatttctgattctgattgctatcagcaatgccccaaactttctcataagcacctaaaacccaaaggtggcagcttgtgaagattggggacactcatattgccctaattaaaaactgtgatttttatcacaagggaggggaggccgagagtcagactgatagacaccataggagccgactctttgatatgccaccagcgaactctcagaaataaatcacagatgcatatagacacacatacataatggtactcccaaactgacaattttacctattctgaaaaagacataaaacagaatt

SEQ ID NO: 504 - DNA, 3983 bp, Homo sapiens
ggatccggaagcacaggagaccaagagaccagagataccaggatgagagataggacccctggttgccaggttcgagaagtcctaggctgagtccctggaaatggtcgcacttggagggtctcgccgccagtggaaggagccaccgcccccgcccgaccatggccgaggagctggtcttagagaggtgtgatctggagctggagaccaatggccgagaccaccacacggccgacctgtgccgggagaagctggtggtgcgacggggccagcccttctggctgaccctgcactttgagggccgcaactacgaggccagtgtagacagtctcaccttcagtgtcgtgaccggcccagcccctagccaggaggccgggaccaaggcccgttttccactaagagatgctgtggaggagggtgactggacagccaccgtggtggaccagcaagactgcaccctctcgctgcagctcaccaccccggccaacgcccccatcggcctgtatcgcctcagcctggaggcctccactggctaccagggatccagctttgtgctgggccacttcattttgctcttcaacgcctggtgcccagcggatgctgtgtacctggactcggaagaggagcggcaggagtatgtcctcacccagcagggctttatctaccagggctcggccaagttcatcaagaacataccttggaattttgggcagtttgaagatgggatcctagacatctgcctgatccttctagatgtcaaccccaagttcctgaagaacgccggccgtgactgctcccgccgcagcagccccgtctacgtgggccgggtggtgagtggcatggtcaactgcaacgatgaccagggtgtgctgctgggacgctgggacaacaactacggggacggcgtcagccccatgtcctggatcggcagcgtggacatcctgcggcgctggaagaaccacggctgccagcgcgtcaagtatggccagtgctgggtcttcgccgccgtggcctgcacagtgctgaggtgcctgggcatccctacccgcgtcgtgaccaactacaactcggcccatgaccagaacagcaaccttctcatcgagtacttccgcaatgagtttggggagatccagggtgacaagagcgagatgatctggaacttccactgctgggtggagtcgtggatgaccaggccggacctgcagccggggtacgagggctggcaggccctggacccaacgccccaggagaagagcgaagggacgtactgctgtggcccagttccagttcgtgccatcaaggagggcgacctgagcaccaagtacgatgcgccctttgtctttgcggaggtcaatgccgacgtggtagactggatccagcaggacgatgggtctgtgcacaaatccatcaaccgttccctgatcgttgggctgaagatcagcactaagagcgtgggccgagacgagcgggaggatatcacccacacctacaaatacccagaggggtcctcagaggagagggaggccttcacaagggcgaaccacctgaacaaactggccgagaaggaggagacagggatggccatgcggatccgtgtgggccagagcatgaacatgggcagtgactttgacgtctttgcccacatcaccaacaacaccgctgaggagtacgtctgccgcctcctgctctgtgcccgcaccgtcagctacaatgggatcttggggcccgagtgtggcaccaagtacctgctcaacctcaacctggagcctttctctgagaagagcgttcctctttgcatcctctatgagaaataccgtgactgccttacggagtccaacctcatcaaggtgcgggccctcctcgtggagccagttatcaacagctacctgctggctgagagggacctctacctggagaatccagaaatcaagatccggatccttggggagcccaagcagaaacgcaagctggtggctgaggtgtccctgcagaacccgctccctgtggccctggaaggctgcaccttcactgtggagggggccggcctgactgaggagcagaagacggtggagatcccagaccccgtggaggcaggggaggaagttaaggtgagaatggacctgctgccgctccacatgggcctccacaagctggtggtgaacttcgagagcgacaagctgaaggctgtgaagggcttccggaatgtcatcattggccccgcctaagggacccctgctcccagcctgctgagagcccccaccttgatcccaatccttatcccaagctagtgagcaaaatatgccccttcttgggccccagaccccagggcagggtgggcagcctatgggggctctcggaaatggaatgtgcccctggcccatctcagcctcctgagcctgtgggtccccactcaccccctttgctgtgaggaatgctctgtgccagaaacagtgggagccctgaccttggctgactggggctggggtgagagaggaaagacctacattccctctcctgcccagatgccctttggaaagccattgaccacccaccatattgtttgatctacttcatagctccttggagcaggcaaaaaagggacagcatgccccttggctggatcagggaatccagctccctagactgcatcccgtacctcttcccatgactgcacccagctccaggggcccttgggacagccagagctgggtggggacagtgataggcccaaggtcccctccacatcccagcagcccaagcttaatagccctccccctcaacctcaccattgtgaagcacctactatgtgctgggtgcctcccacacttgctggggctcacggggcctccaacccatttaatcaccatgggaaactgttgtgggcgctgcttccaggataaggagactgaggcttagagagaggaggcagccccctccacaccagtggcctcgtggttattagcaaggctgggtaatgtgaaggcccaagagcagagtctgggcctctgactctgagtccactgctccatttataaccccagcctgacctgagactgtcggagaggctgtctggggcctttatcaaaaaaagactcagccaagacaaggaggtagagaggggactgggggactgggagtcagagccctggctgggttcaggtcccacgtctggccaggcactgccttctcctctctgggcctttgtttccttgttggtcagaggagtgattgaaccagctcatctccaaggatcctctccactccatgtttgcaatgcttttatatggcccagccttgtaaataaccacaaggtccactccctgctccacgaagccttaagccataggcccaggatatttctgagagtgaaaccatgactgtgaccaccttctgtccccagccctgtcctggttccttcctatgcccaggtaccacccttcagaccccagttctaggggagaagagccctggacacccctgctctacccatgagcctgcccgctgcaatgcctagacttcccaacagccttagctgccagtgctggtcactaaccaacaaggttggcaccccagctaccccttctttgcagggctaaggcccccaaacatagcccctgccccggaggaagcttggggaacccatgagttgtcagctttgactttatctcctgctctttctacatgactgggcctcccttgggctggaagaattggggattctctattggaggtgagatcacagcctccagggccccccaaatcccagggaaggacttggagagaatcatgctgttgcatttagaactttctgctttgcacaggaaagagtcacacaattaatcaacatgtatattttctctatacatagagctctatttctctacggttttataaaagccttgggttccaaccaggcagtagatgtgcttctgaaccgcaaggagcaaacactgaaataaaatagtttatttttcacactcaaacta

SEQ ID NO: 505 - DNA, 3882 bp, Homo sapiens
tggtcgcacttggagggtctcgccgccagtggaaggagccaccgcccccgcccgaccatggccgaggagctggtcttagagaggtgtgatctggagctggagaccaatggccgagaccaccacacggccgacctgtgccgggagaagctggtggtgcgacggggccagcccttctggctgaccctgcactttgagggccgcaactacgaggccagtgtagacagtctcaccttcagtgtcgtgaccggcccagcccctagccaggaggccgggaccaaggcccgttttccactaagagatgctgtggaggagggtgactggacagccaccgtggtggaccagcaagactgcaccctctcgctgcagctcaccaccccggccaacgcccccatcggcctgtatcgcctcagcctggaggcctccactggctaccagggatccagctttgtgctgggccacttcattttgctcttcaacgcctggtgcccagcggatgctgtgtacctggactcggaagaggagcggcaggagtatgtcctcacccagcagggctttatctaccagggctcggccaagttcatcaagaacataccttggaattttgggcagtttgaagatgggatcctagacatctgcctgatccttctagatgtcaaccccaagttcctgaagaacgccggccgtgactgctcccgccgcagcagccccgtctacgtgggccgggtggtgagtggcatggtcaactgcaacgatgaccagggtgtgctgctgggacgctgggacaacaactacggggacggcgtcagccccatgtcctggatcggcagcgtggacatcctgcggcgctggaagaaccacggctgccagcgcgtcaagtatggccagtgctgggtcttcgccgccgtggcctgcacagtgctgaggtgcctgggcatccctacccgcgtcgtgaccaactacaactcggcccatgaccagaacagcaaccttctcatcgagtacttccgcaatgagtttggggagatccagggtgacaagagcgagatgatctggaacttccactgctgggtggagtcgtggatgaccaggccggacctgcagccggggtacgagggctggcaggccctggacccaacgccccaggagaagagcgaagggacgtactgctgtggcccagttccagttcgtgccatcaaggagggcgacctgagcaccaagtacgatgcgccctttgtctttgcggaggtcaatgccgacgtggtagactggatccagcaggacgatgggtctgtgcacaaatccatcaaccgttccctgatcgttgggctgaagatcagcactaagagcgtgggccgagacgagcgggaggatatcacccacacctacaaatacccagaggggtcctcagaggagagggaggccttcacaagggcgaaccacctgaacaaactggccgagaaggaggagacagggatggccatgcggatccgtgtgggccagagcatgaacatgggcagtgactttgacgtctttgcccacatcaccaacaacaccgctgaggagtacgtctgccgcctcctgctctgtgcccgcaccgtcagctacaatgggatcttggggcccgagtgtggcaccaagtacctgctcaacctcaacctggagcctttctctgagaagagcgttcctctttgcatcctctatgagaaataccgtgactgccttacggagtccaacctcatcaaggtgcgggccctcctcgtggagccagttatcaacagctacctgctggctgagagggacctctacctggagaatccagaaatcaagatccggatccttggggagcccaagcagaaacgcaagctggtggctgaggtgtccctgcagaacccgctccctgtggccctggaaggctgcaccttcactgtggagggggccggcctgactgaggagcagaagacggtggagatcccagaccccgtggaggcaggggaggaagttaaggtgagaatggacctgctgccgctccacatgggcctccacaagctggtggtgaacttcgagagcgacaagctgaaggctgtgaagggcttccggaatgtcatcattggccccgcctaagggacccctgctcccagcctgctgagagcccccaccttgatcccaatccttatcccaagctagtgagcaaaatatgccccttcttgggccccagaccccagggcagggtgggcagcctatgggggctctcggaaatggaatgtgcccctggcccatctcagcctcctgagcctgtgggtccccactcaccccctttgctgtgaggaatgctctgtgccagaaacagtgggagccctgaccttggctgactggggctggggtgagagaggaaagacctacattccctctcctgcccagatgccctttggaaagccattgaccacccaccatattgtttgatctacttcatagctccttggagcaggcaaaaaagggacagcatgccccttggctggatcagggaatccagctccctagactgcatcccgtacctcttcccatgactgcacccagctccaggggcccttgggacagccagagctgggtggggacagtgataggcccaaggtcccctccacatcccagcagcccaagcttaatagccctccccctcaacctcaccattgtgaagcacctactatgtgctgggtgcctcccacacttgctggggctcacggggcctccaacccatttaatcaccatgggaaactgttgtgggcgctgcttccaggataaggagactgaggcttagagagaggaggcagccccctccacaccagtggcctcgtggttattagcaaggctgggtaatgtgaaggcccaagagcagagtctgggcctctgactctgagtccactgctccatttataaccccagcctgacctgagactgtcggagaggctgtctggggcctttatcaaaaaaagactcagccaagacaaggaggtagagaggggactgggggactgggagtcagagccctggctgggttcaggtcccacgtctggccaggcactgccttctcctctctgggcctttgtttccttgttggtcagaggagtgattgaaccagctcatctccaaggatcctctccactccatgtttgcaatgcttttatatggcccagccttgtaaataaccacaaggtccactccctgctccacgaagccttaagccataggcccaggatatttctgagagtgaaaccatgactgtgaccaccttctgtccccagccctgtcctggttccttcctatgcccaggtaccacccttcagaccccagttctaggggagaagagccctggacacccctgctctacccatgagcctgcccgctgcaatgcctagacttcccaacagccttagctgccagtgctggtcactaaccaacaaggttggcaccccagctaccccttctttgcagggctaaggcccccaaacatagcccctgccccggaggaagcttggggaacccatgagttgtcagctttgactttatctcctgctctttctacatgactgggcctcccttgggctggaagaattggggattctctattggaggtgagatcacagcctccagggccccccaaatcccagggaaggacttggagagaatcatgctgttgcatttagaactttctgctttgcacaggaaagagtcacacaattaatcaacatgtatattttctctatacatagagctctatttctctacggttttataaaagccttgggttccaaccaggcagtagatgtgcttctgaaccgcaaggagcaaacactgaaataaaatagtttatttttcacactcaaacta

SEQ ID NO: 506 - DNA, 3613 bp, Homo sapiens
ggatccggaagcacaggagaccaagagaccagagataccaggatgagagataggacccctggttgccaggttcgagaagtcctaggctgagtccctggaaatggtcgcacttggagggtctcgccgccagtggaaggagccaccgcccccgcccgaccatggccgaggagctggtcttagagaggtgtgatctggagctggagaccaatggccgagaccaccacacggccgacctgtgccgggagaagctggtggtgcgacggggccagcccttctggctgaccctgcactttgagggccgcaactacgaggccagtgtagacagtctcaccttcagtgtcgtgaccggcccagcccctagccaggaggccgggaccaaggcccgttttccactaagagatgctgtggaggagggtgactggacagccaccgtggtggaccagcaagactgcaccctctcgctgcagctcaccaccccggccaacgcccccatcggcctgtatcgcctcagcctggaggcctccactggctaccagggatccagctttgtgctgggccacttcattttgctcttcaacgcctggtgcccagcggatgctgtgtacctggactcggaagaggagcggcaggagtatgtcctcacccagcagggctttatctaccagggctcggccaagttcatcaagaacataccttggaattttgggcagtttgaagatgggatcctagacatctgcctgatccttctagatgtcaaccccaagttcctgaagaacgccggccgtgactgctcccgccgcagcagccccgtctacgtgggccgggtggtgagtggcatggtcaactgcaacgatgaccagggtgtgctgctgggacgctgggacaacaactacggggacggcgtcagccccatgtcctggatcggcagcgtggacatcctgcggcgctggaagaaccacggctgccagcgcgtcaagtatggccagtgctgggtcttcgccgccgtggcctgcacagtgctgaggtgcctgggcatccctacccgcgtcgtgaccaactacaactcggcccatgaccagaacagcaaccttctcatcgagtacttccgcaatgagtttggggagatccagggtgacaagagcgagatgatctggaacttccactgctgggtggagtcgtggatgaccaggccggacctgcagccggggtacgagggctggcaggccctggacccaacgccccaggagaagagcgaagggacgtactgctgtggcccagttccagttcgtgccatcaaggagggcgacctgagcaccaagtacgatgcgccctttgtctttgcggaggtcaatgccgacgtggtagactggatccagcaggacgatgggtctgtgcacaaatccatcaaccgttccctgatcgttgggctgaagatcagcactaagagcgtgggccgagacgagcgggaggatatcacccacacctacaaatacccagaggggtcctcagaggagagggaggccttcacaagggcgaaccacctgaacaaactggccgagaaggaggagacagggatggccatgcggatccgtgtgggccagagcatgaacatgggcagtgactttgacgtctttgcccacatcaccaacaacaccgctgaggagtacgtctgccgcctcctgctctgtgcccgcaccgtcagctacaatgggatcttggggcccgagtgtggcaccaagtacctgctcaacctcaacctggagcctttctctgagaagagcgttcctctttgcatcctctatgagaaataccgtgactgccttacggagtccaacctcatcaaggtgcgggccctcctcgtggagccagttatcaacagctacctgctggctgagagggacctctacctggagaatccagaaatcaagatccggatccttggggagcccaagcagaaacgcaagctggtggctgaggtgtccctgcagaacccgctccctgtggccctggaaggctgcaccttcactgtggagggggccggcctgactgaggagcagaagacggtggagatcccagaccccgtggaggcaggggaggaagttaaggtgagaatggacctgctgccgctccacatgggcctccacaagctggtggtgaacttcgagagcgacaagctgaaggctgtgaagggcttccggaatgtcatcattggccccgcctaagggacccctgctcccagcctgctgagagcccccaccttgatcccaatccttatcccaagctagtgagcaaaatatgccccttcttgggccccagaccccagggcagggtgggcagcctatgggggctctcggaaatggaatgtgcccctggcccatctcagcctcctgagcctgtgggtccccactcaccccctttgctgtgaggaatgctctgtgccagaaacagtgggagccctgaccttggctgactggggctggggtgagagaggaaagacctacattccctctcctgcccagatgccctttggaaagccattgaccacccaccatattgtttgatctacttcatagctccttggagcaggcaaaaaagggacagcatgccccttggctggatcagggaatccagctccctagactgcatcccgtacctcttcccatgactgcacccagctccaggggcccttgggacagccagagctgggtggggacagtgataggcccaaggtcccctccacatcccagcagcccaagcttaatagccctccccctcaacctcaccattgtgaagcacctactatgtgctgggtgcctcccacacttgctggggctcacggggcctccaacccatttaatcaccatgggaaactgttgtgggcgctgcttccaggataaggagactgaggcttagagagaggaggcagccccctccacaccagtggcctcgtggttattagcaaggctgggtaatgtgaaggcccaagagcagagtctgggcctctgactctgagtccactgctccatttataaccccagcctgacctgagactgtcggagaggctgtctggggcctttatcaaaaaaagactcagccaagacaaggaggtagagaggggactgggggactgggagtcagagccctggctgggttcaggtcccacgtctggccaggcactgccttctcctctctgggcctttgtttccttgttggtcagaggagtgattgaaccagctcatctccaaggatcctctccactccatgtttgcaatgcttttatatggcccagccttgtaaataaccacaaggtccactccctgctccacgaagccttaagccataggcccaggatatttctgagaatcacagcctccagggccccccaaatcccagggaaggacttggagagaatcatgctgttgcatttagaactttctgctttgcacaggaaagagtcacacaattaatcaacatgtatattttctctatacatagagctctatttctctacggttttataaaagccttgggttccaaccaggcagtagatgtgcttctgaaccgcaaggagcaaacactgaaataaaatagtttatttttcacactcaaacta

SEQ ID NO: 507 - DNA, 3505 bp, Homo sapiens
ggatccggaagcacaggagaccaagagaccagagataccaggatgagagataggacccctggttgccaggttcgagaagtcctaggctgagtccctggaaatggtcgcacttggagggtctcgccgccagtggaaggagccaccgcccccgcccgaccatggccgaggagctggtcttagagaggtgtgatctggagctggagaccaatggccgagaccaccacacggccgacctgtgccgggagaagctggtggtgcgacggggccagcccttctggctgaccctgcactttgagggccgcaactacgaggccagtgtagacagtctcaccttcagtgtcgtgaccggcccagcccctagccaggaggccgggaccaaggcccgttttccactaagagatgctgtggaggagggtgactggacagccaccgtggtggaccagcaagactgcaccctctcgctgcagctcaccaccccggccaacgcccccatcggcctgtatcgcctcagcctggaggcctccactggctaccagggatccagctttgtgctgggccacttcattttgctcttcaacgcctggtgcccagcggatgctgtgtacctggactcggaagaggagcggcaggagtatgtcctcacccagcagggctttatctaccagggctcggccaagttcatcaagaacataccttggaattttgggcagtttgaagatgggatcctagacatctgcctgatccttctagatgtcaaccccaagttcctgaagaacgccggccgtgactgctcccgccgcagcagccccgtctacgtgggccgggtggtgagtggcatggtcaactgcaacgatgaccagggtgtgctgctgggacgctgggacaacaactacggggacggcgtcagccccatgtcctggatcggcagcgtggacatcctgcggcgctggaagaaccacggctgccagcgcgtcaagtatggccagtgctgggtcttcgccgccgtggcctgcacagtgctgaggtgcctgggcatccctacccgcgtcgtgaccaactacaactcggcccatgaccagaacagcaaccttctcatcgagtacttccgcaatgagtttggggagatccagggtgacaagagcgagatgatctggaacttccactgctgggtggagtcgtggatgaccaggccggacctgcagccggggtacgagggctggcaggccctggacccaacgccccaggagaagagcgaagggacgtactgctgtggcccagttccagttcgtgccatcaaggagggcgacctgagcaccaagtacgatgcgccctttgtctttgcggaggtcaatgccgacgtggtagactggatccagcaggacgatgggtctgtgcacaaatccatcaaccgttccctgatcgttgggctgaagatcagcactaagagcgtgggccgagacgagcgggaggatatcacccacacctacaaatacccagaggggtcctcagaggagagggaggccttcacaagggcgaaccacctgaacaaactggccgagaaggaggagacagggatggccatgcggatccgtgtgggccagagcatgaacatgggcagtgactttgacgtctttgcccacatcaccaacaacaccgctgaggagtacgtctgccgcctcctgctctgtgcccgcaccgtcagctacaatgggatcttggggcccgagtgtggcaccaagtacctgctcaacctcaacctggagcctttctctgagaagagcgttcctctttgcatcctctatgagaaataccgtgactgccttacggagtccaacctcatcaaggtgcgggccctcctcgtggagccagttatcaacagctacctgctggctgagagggacctctacctggagaatccagaaatcaagatccggatccttggggagcccaagcagaaacgcaagctggtggctgaggtgtccctgcagaacccgctccctgtggccctggaaggctgcaccttcactgtggagggggccggcctgactgaggagcagaagacggtggagatcccagaccccgtggaggcaggggaggaagttaaggtgagaatggacctgctgccgctccacatgggcctccacaagctggtggtgaacttcgagagcgacaagctgaaggctgtgaagggcttccggaatgtcatcattggccccgcctaagggacccctgctcccagcctgctgagagcccccaccttgatcccaatccttatcccaagctagtgagcaaaatatgccccttcttgggccccagaccccagggcagggtgggcagcctatgggggctctcggaaatggaatgtgcccctggcccatctcagcctcctgagcctgtgggtccccactcaccccctttgctgtgaggaatgctctgtgccagaaacagtgggagccctgaccttggctgactggggctggggtgagagaggaaagacctacattccctctcctgcccagatgccctttggaaagccattgaccacccaccatattgtttgatctacttcatagctccttggagcaggcaaaaaagggacagcatgccccttggctggatcagggaatccagctccctagactgcatcccgtacctcttcccatgactgcacccagctccaggggcccttgggacagccagagctgggtggggacagtgataggcccaaggggggcctccaacccatttaatcaccatgggaaactgttgtgggcgctgcttccaggataaggagactgaggcttagagagaggaggcagccccctccacaccagtccactccctgctccacgaagccttaagccataggcccaggatatttctgagagtgaaaccatgactgtgaccaccttctgtccccagccctgtcctggttccttcctatgcccaggtaccacccttcagaccccagttctaggggagaagagccctggacacccctgctctacccatgagcctgcccgctgcaatgcctagacttcccaacagccttagctgccagtgctggtcactaaccaacaaggttggcaccccagctaccccttctttgcagggctaaggcccccaaacatagcccctgccccggaggaagcttggggaacccatgagttgtcagctttgactttatctcctgctctttctacatgactgggcctcccttgggctggaagaattggggattctctattggaggtgagatcacagcctccagggccccccaaatcccagggaaggacttggagagaatcatgctgttgcatttagaactttctgctttgcacaggaaagagtcacacaattaatcaacatgtatattttctctatacatagagctctatttctctacggttttataaaagccttgggttccaaccaggcagtagatgtgcttctgaaccgcaaggagcaaacactgaaataaaatagtttatttttcacactcaaa

SEQ ID NO: 508 - DNA, 1216 bp, Homo sapiens
ggatccggaagcacaggagaccaagagaccagagataccaggatgagagataggacccctggttgccaggttcgagaagtcctaggctgagtccctggaaatggtcgcacttggagggtctcgccgccagtggaaggagccaccgcccccgcccgaccatggccgaggagctggtcttagagaggtgtgatctggagctggagaccaatggccgagaccaccacacggccgacctgtgccgggagaagctggtggtgcgacggggccagcccttctggctgaccctgcactttgagggccgcaactacgaggccagtgtagacagtctcaccttcagtgtcgtgaccggcccagcccctagccaggaggccgggaccaaggcccgttttccactaagagatgctgtggaggagggtgactggacagccaccgtggtggaccagcaagactgcaccctctcgctgcagctcaccaccccggccaacgcccccatcggcctgtatcgcctcagcctggaggcctccactggctaccagggatccagctttgtgctgggccacttcattttgctcttcaacgcctggtgcccagcggatgctgtgtacctggactcggaagaggagcggcaggagtatgtcctcacccagcagggctttatctaccagggctcggccaagttcatcaagaacataccttggaattttgggcagtttgaagatgggatcctagacatctgcctgatccttctagatgtcaaccccaagttcctgaagaacgccggccgtgactgctcccgccgcagcagccccgtctacgtgggccgggtggtgagtggcatggtcaactgcaacgatgaccagggtgtgctgctgggacgctgggacaacaactacggggacggcgtcagccccatgtcctggatcggcagcgtggacatcctgcggcgctggaagaaccacggctgccagcgcgtcaagtatggccagtgctgggtcttcgccgccgtggcctgcacaggtgagctgcacgctgggatgtgggtcatgagccctgggagggggcacgaagagcactggagtaggaatcaggacatccctgccctggtcctgccccctgccaccaacactctcaatgcgctatgtggcctagagcctgtgaccaccctctccggtcctttatccaatagccatccctccagtggttgttaggatcaagg

SEQ ID NO: 509 - DNA, 2217 bp, Homo sapiens
ggatccggaagcacaggagaccaagagaccagagataccaggatgagagataggacccctggttgccaggttcgagaagtcctaggctgagtccctggaaatggtcgcacttggagggtctcgccgccagtggaaggagccaccgcccccgcccgaccatggccgaggagctggtcttagagaggtgtgatctggagctggagaccaatggccgagaccaccacacggccgacctgtgccgggagaagctggtggtgcgacggggccagcccttctggctgaccctgcactttgagggccgcaactacgaggccagtgtagacagtctcaccttcagtgtcgtgaccggcccagcccctagccaggaggccgggaccaaggcccgttttccactaagagatgctgtggaggagggtgactggacagccaccgtggtggaccagcaagactgcaccctctcgctgcagctcaccaccccggccaacgcccccatcggcctgtatcgcctcagcctggaggcctccactggctaccagggatccagctttgtgctgggccacttcattttgctcttcaacgcctggtgcccagcggatgctgtgtacctggactcggaagaggagcggcaggagtatgtcctcacccagcagggctttatctaccagggctcggccaagttcatcaagaacataccttggaattttgggcagtttgaagatgggatcctagacatctgcctgatccttctagatgtcaaccccaagttcctgaagaacgccggccgtgactgctcccgccgcagcagccccgtctacgtgggccgggtggtgagtggcatggtcaactgcaacgatgaccagggtgtgctgctgggacgctgggacaacaactacggggacggcgtcagccccatgtcctggatcggcagcgtggacatcctgcggcgctggaagaaccacggctgccagcgcgtcaagtatggccagtgctgggtcttcgccgccgtggcctgcacagtgctgaggtgcctgggcatccctacccgcgtcgtgaccaactacaactcggcccatgaccagaacagcaaccttctcatcgagtacttccgcaatgagtttggggagatccagggtgacaagagcgagatgatctggaacttccactgctgggtggagtcgtggatgaccaggccggacctgcagccggggtacgagggctggcaggccctggacccaacgccccaggagaagagcgaagggacgtactgctgtggcccagttccagttcgtgccatcaaggagggcgacctgagcaccaagtacgatgcgccctttgtctttgcggaggtcaatgccgacgtggtagactggatccagcaggacgatgggtctgtgcacaaatccatcaaccgttccctgatcgttgggctgaagatcagcactaagagcgtgggccgagacgagcgggaggatatcacccacacctacaaatacccagaggggtcctcagaggagagggaggccttcacaagggcgaaccacctgaacaaactggccgagaaggaggagacagggatggccatgcggatccgtgtgggccagagcatgaacatgggcagtgactttgacgtctttgcccacatcaccaacaacaccgctgaggagtacgtctgccgcctcctgctctgtgcccgcaccgtcagctacaatgggatcttggggcccgagtgtggcaccaagtacctgctcaacctcaacctggagcctttctctggtaaagccctgtgttcctggagcatttgttgaccgccaactgacaacatgctaggtagtgacctaaccacttagcatgtgtgatttcaccccacagacacttacatggcgctgactctggggcaggccctgtcctaagcactttataaatatcaacccacttaattcttattgcaagatgaggctggtccaagtcccctgttggaacctccaatgccaagctcaagctgagatgcgttccctctaagcccccatactgtggttgagttacttgttattctttgatgataagatctggggaatttccgtgtgctggtggacaggaagccaggccctggatggctgaaaggaatccagttgcccccacccctgcctcctttctctgctgcttctttctcttctccttcctgcctccaccctttcatgctctctcctccctcatccc

SEQ ID NO: 510 - DNA, 1914 bp, Homo sapiens
attgcagggctagaagtggccctcacagacctccagagctccagaaataatgtgcggcaccacacggaggagatcactgtggaccacctgcttgttcgccggggccaggccttcaacctcaccctgtacttcaggaaccggagcttccagccaggcctggacaacatcatcttcgtggttgaaactgaggatgctgtctacttggacagtgaaccccagaggcaggagtatgtcatgaatgattatggcttcatctaccaaggcagcaagaactggatccgcccatgtccctggaactatggacagtttgaagacaaaatcatagacatctgcctgaagctgctagacaagagcctgcacttccagactgacccagccacagactgtgctctgcggggaagccccgtctacgtcagcagagtggtgtgtgccatgatcaacagcaatgatgataatggggtgctcaatggaaactggagtgagaattacacagacggcgccaaccctgcggagtggacgggcagcgtggccatcctgaagcagtggaacgccacaggctgccagcccgtgcgctacgggcaatgctgggtctttgctgccgtcatgtgcacagtgatgaggtgtctggggatccctacccgtgtgatcaccaacttcgactctggccacgatacagatggaaacctgatcatagatgagtattatgacaacacaggcaggattttggggaataagaagaaggatactatctggaacttccatgtctggaatgagtgctggatggcccggaaggatctgccccctgcatatggaggctggcaggtgctggacgccacacctcaggagatgagcaacggcgtctactgctgtggccctgcctctgtcagagccatcaaagaaggagaagtggacctgaactatgacacgccctttgtgttttcgatggtgaatgctgactgcatgtcctggctcgtccagggagggaaggagcagaagcttcaccaggacacgagttctgttggcaattttatcagcacaaagagcatccagagtgacgagcgggatgacatcacagagaactacaagtatgaagaaggatccctccaggagaggcaggtgtttctgaaggctctgcagaagctgaaggctagaagcttccatggctcccaaagaggagcagagttgcaaccttccaggcccacatcactgagccaggacagccctcggagcctgcatacaccttcccttcgacccagtgatgtggtgcaagtctccctgaaattcaagctgctcgacccgcccaacatgggccaggatatatgctttgtcctgctggccctcaacatgtcctcccagttcaaggacctcaaagtgaacctgagtgcccagtctctgctgcacgatggcagccccctgtccccattctggcaggacacagcgttcatcacactctctcctaaagaagcaaagacctacccctgcaaaatctcctattcccagtacagccagtacctgtcaacagacaagctgatccgcatcagtgccctgggtgaagagaaaagcagtcctgagaaaatcctggtgaacaagatcatcaccttatcttatccaagcatcacgattaatgtaggcaggagagcagccgttgtgaaccagccactctccatacaggtgatattttcaaaccccctctcggagcaggttgaggactgtgtgctgactgtggaaggaagtggcctcttcaagaaacagcagaaagtcttccttggagtcctcaaaccccaacaccaagcaagcatcattctggagaccgtccccttcaagagtggacaaaggcagatccaagctaatatgagaagcaacaagtttaaggacattaagggttacaggaatgtttatgtagactttgcatta

SEQ ID NO: 511 - DNA, 2154 bp, Homo sapiens
gggctagaagtggccctcacagacctccagagctccagaaataatgtgcggcaccacacggaggagatcactgtggaccacctgcttgttcgccggggccaggccttcaacctcaccctgtacttcaggaaccggagcttccagccaggcctggacaacatcatcttcgtggttgaaactggaccgctgccagacctggccttggggactcgggctgtgttcagcctggcacgccatcacagccccagcccctggattgcctggctggagaccaatggggccacctccacagaggtgagcttgtgcgctcctcccacggcggccgtgggtcggtacctcttgaaaatccacatcgactccttccaggggtctgtgacggcctaccagctaggggagttcatcctgcttttcaatccctggtgcccagaggatgctgtctacttggacagtgaaccccagaggcaggagtatgtcatgaatgattatggcttcatctaccaaggcagcaagaactggatccgcccatgtccctggaactatggacagtttgaagacaaaatcatagacatctgcctgaagctgctagacaagagcctgcacttccagactgacccagccacagactgtgctctgcggggaagccccgtctacgtcagcagagtggtgtgtgccatgatcaacagcaatgatgataatggggtgctcaatggaaactggagtgagaattacacagacggcgccaaccctgcggagtggacgggcagcgtggccatcctgaagcagtggaacgccacaggctgccagcccgtgcgctacgggcaatgctgggtctttgctgccgtcatgtgcacagtgatgaggtgtctggggatccctacccgtgtgatcaccaacttcgactctggccacgatacagatggaaacctgatcatagatgagtattatgacaacacaggcaggattttggggaataagaagaaggatactatctggaacttccatgtctggaatgagtgctggatggcccggaaggatctgccccctgcatatggaggctggcaggtgctggacgccacacctcaggagatgagcaacggcgtctactgctgtggccctgcctctgtcagagccatcaaagaaggagaagtggacctgaactatgacacgccctttgtgttttcgatggtgaatgctgactgcatgtcctggctcgtccagggagggaaggagcagaagcttcaccaggacacgagttctgttggcaattttatcagcacaaagagcatccagagtgacgagcgggatgacatcacagagaactacaagtatgaagaaggatccctccaggagaggcaggtgtttctgaaggctctgcagaagctgaaggctagaagcttccatggctcccaaagaggagcagagttgcaaccttccaggcccacatcactgagccaggacagccctcggagcctgcatacaccttcccttcgacccagtgatgtggtgcaagtctccctgaaattcaagctgctcgacccgcccaacatgggccaggatatatgctttgtcctgctggccctcaacatgtcctcccagttcaaggacctcaaagtgaacctgagtgcccagtctctgctgcacgatggcagccccctgtccccattctggcaggacacagcgttcatcacactctctcctaaagaagcaaagacctacccctgcaaaatctcctattcccagtacagccagtacctgtcaacagacaagctgatccgcatcagtgccctgggtgaagagaaaagcagtcctgagaaaatcctggtgaacaagatcatcaccttatcttatccaagcatcacgattaatgtaggcaggagagcagccgttgtgaaccagccactctccatacaggtgatattttcaaaccccctctcggagcaggttgaggactgtgtgctgactgtggaaggaagtggcctcttcaagaaacagcagaaagtcttccttggagtcctcaaaccccaacaccaagcaagcatcattctggagaccgtccccttcaagagtggacaaaggcagatccaagctaatatgagaagcaacaagtttaaggacattaagggttacaggaatgtttatgtagactttgcatta

SEQ ID NO: 512 - DNA, 2202 bp, Homo sapiens
ggctgccccattgcagggctagaagtggccctcacagacctccagagctccagaaataatgtgcggcaccacacggaggagatcactgtggaccacctgcttgttcgccggggccaggccttcaacctcaccctgtacttcaggaaccggagcttccagccaggcctggacaacatcatcttcgtggttgaaactggaccgctgccagacctggccttggggactcgggctgtgttcagcctggcacgccatcacagccccagcccctggattgcctggctggagaccaatggggccacctccacagaggtgagcttgtgcgctcctcccacggcggccgtgggtcggtacctcttgaaaatccacatcgactccttccaggggtctgtgacggcctaccagctaggggagttcatcctgcttttcaatccctggtgcccagaggatgctgtctacttggacagtgaaccccagaggcaggagtatgtcatgaatgattatggcttcatctaccaaggcagcaagaactggatccgcccatgtccctggaactatggacagtttgaagacaaaatcatagacatctgcctgaagctgctagacaagagcctgcacttccagactgacccagccacagactgtgctctgcggggaagccccgtctacgtcagcagagtggtgtgtgccatgatcaacagcaatgatgataatggggtgctcaatggaaactggagtgagaattacacagacggcgccaaccctgcggagtggacgggcagcgtggccatcctgaagcagtggaacgccacaggctgccagcccgtgcgctacgggcaatgctgggtctttgctgccgtcatgtgcacagtgatgaggtgtctggggatccctacccgtgtgatcaccaacttcgactctggccacgatacagatggaaacctgatcatagatgagtattatgacaacacaggcaggattttggggaataagaagaaggatactatctggaacttccatgtctggaatgagtgctggatggcccggaaggatctgccccctgcatatggaggctggcaggtgctggacgccacacctcaggagatgagcaacggcgtctactgctgtggccctgcctctgtcagagccatcaaagaaggagaagtggacctgaactatgacacgccctttgtgttttcgatggtgaatgctgactgcatgtcctggctcgtccagggagggaaggagcagaagcttcaccaggacacgagttctgttggcaattttatcagcacaaagagcatccagagtgacgagcgggatgacatcacagagaactacaagtatgaagaaggatccctccaggagaggcaggtgtttctgaaggctctgcagaagctgaaggctagaagcttccatggctcccaaagaggagcagagttgcaaccttccaggcccacatcactgagccaggacagccctcggagcctgcatacaccttcccttcgacccagtgatgtggtgcaagtctccctgaaattcaagctgctcgacccgcccaacatgggccaggatatatgctttgtcctgctggccctcaacatgtcctcccagttcaaggacctcaaagtgaacctgagtgcccagtctctgctgcacgatggcagccccctgtccccattctggcaggacacagcgttcatcacactctctcctaaagaagcaaagacctacccctgcaaaatctcctattcccagtacagccagtacctgtcaacagacaagctgatccgcatcagtgccctgggtgaagagaaaagcagtcctgagaaaatcctggtgaacaagatcatcaccttatcttatccaagcatcacgattaatgttctaggagcagccgttgtgaaccagccactctccatacaggtgatattttcaaaccccctctcggagcaggttgaggactgtgtgctgactgtggaaggaagtggcctcttcaagaaacagcagaaagtcttccttggagtcctcaaaccccaacaccaagcaagcatcattctggagaccgtccccttcaagagtggacaaaggcagatccaagctaatatgagaagcaacaagtttaaggacattaagggttacaggaatgtttatgtagactttgcattataaattctggaacaacgcgccagacgtgtgaatttc

SEQ ID NO: 513 - DNA, 1947 bp, Homo sapiens
attgcagggctagaagtggccctcacagacctccagagctccagaaataatgtgcggcaccacacggaggagatcactgtggaccacctgcttgttcgccggggccaggccttcaacctcaccctgtacttcaggaaccggagcttccagccaggcctggacaacatcatcttcgtggttgaaactgaggatgctgtctacttggacagtgaaccccagaggcaggagtatgtcatgaatgattatggcttcatctaccaaggcagcaagaactggatccgcccatgtccctggaactatggacagtttgaagacaaaatcatagacatctgcctgaagctgctagacaagagcctgcacttccagactgacccagccacagactgtgctctgcggggaagccccgtctacgtcagcagagtggtgtgtgccatgatcaacagcaatgatgataatggggtgctcaatggaaactggagtgagaattacacagacggcgccaaccctgcggagtggacgggcagcgtggccatcctgaagcagtggaacgccacaggctgccagcccgtgcgctacgggcaatgctgggtctttgctgccgtcatgtgcacagtgatgaggtgtctggggatccctacccgtgtgatcaccaacttcgactctggccacgatacagatggaaacctgatcatagatgagtattatgacaacacaggcaggattttggggaataagaagaaggatactatctggaacttccatgtctggaatgagtgctggatggcccggaaggatctgccccctgcatatggaggctggcaggtgctggacgccacacctcaggagatgagcaacggcgtctactgctgtggccctgcctctgtcagagccatcaaagaaggagaagtggacctgaactatgacacgccctttgtgttttcgatggtgaatgctgactgcatgtcctggctcgtccagggagggaaggagcagaagcttcaccaggacacgagttctgttggcaattttatcagcacaaagagcatccagagtgacgagcgggatgacatcacagagaactacaagtatgaagaaggatccctccaggagaggcaggtgtttctgaaggctctgcagaagctgaaggctagaagcttccatggctcccaaagaggagcagagttgcaaccttccaggcccacatcactgagccaggacagccctcggagcctgcatacaccttcccttcgacccagtgatgtggtgcaagtctccctgaaattcaagctgctcgacccgcccaacatgggccaggatatatgctttgtcctgctggccctcaacatgtcctcccagttcaaggacctcaaagtgaacctgagtgcccagtctctgctgcacgatggcagccccctgtccccattctggcaggacacagcgttcatcacactctctcctaaagaagcaaagacctacccctgcaaaatctcctattcccagtacagccagtacctgtcaacagacaagctgatccgcatcagtgccctgggtgaagagaaaagcagtcctgagaaaatcctggtgaacaagatcatcaccttatcttatccaagcatcacgattaatgttctaggagcagccgttgtgaaccagccactctccatacaggtgatattttcaaaccccctctcggagcaggttgaggactgtgtgctgactgtggaaggaagtggcctcttcaagaaacagcagaaagtcttccttggagtcctcaaaccccaacaccaagcaagcatcattctggagaccgtccccttcaagagtggacaaaggcagatccaagctaatatgagaagcaacaagtttaaggacattaagggttacaggaatgtttatgtagactttgcattataaattctggaacaacgcgccagacgtgtgaatttc

SEQ ID NO: 514 - DNA, 2417 bp, Homo sapiens
ggcccagcacgcggccgctctggcccagggaagtccctgtccttaccttcagcaggagccggttccctgtgtgtgtgtccgctcgccctctgctccgtcctgcggctgcccactgccctcctacggtccaccatggccctgctgcactccggccgcgtcctccccgggatcgccgccgccttccacccgggcctcgccgccgcggcctctgccagagccagctcctggtggacccatgtggaaatgggacctccagatcccattctgggagtcactgaagcctttaagagggacaccaatagcaaaaagatgaatctgggagttggtgcctaccgggatgataacggaaagccttacgtgctgcctagcgtccgcaaggcagaggcccagattgccgcaaaaaatttggacaaggaatacctgcccattgggggactggctgaattttgcaaggcatctgcagaactagccctgggtgagaacagcgaagtcttgaagagtggccggtttgtcactgtgcagaccatttctggaactggagccttaaggatcggagccagttttctgcaaagattttttaagttcagccgagatgtctttctgcccaaaccaacctggggaaaccacacacccatcttcagggatgctggcatgcagctacaaggttatcggtattatgaccccaagacttgcggttttgacttcacaggcgctgtggaggatatttcaaaaataccagagcagagtgttcttcttctgcatgcctgcgcccacaatcccacgggagtggacccgcgtccggaacagtggaaggaaatagcaacagtggtgaagaaaaggaatctctttgcgttctttgacatggcctaccaaggctttgccagtggtgatggtgataaggatgcctgggctgtgcgccacttcatcgaacagggcattaatgtttgtctctgccaatcatatgccaagaacatgggcttatatggtgagcgtgtaggagccttcactatggtctgcaaagatgcggatgaagccaaaagggtagagtcacagttgaagatcttgatccgtcccatgtattccaaccctcccctcaatggggcccggattgctgctgccattctgaacaccccagatttgcgaaaacaatggctgcaagaagtgaaaggcatggctgaccgcatcattggcatgcggactcaactggtctccaacctcaagaaggagggttccacccacaattggcaacacatcaccgaccaaattggcatgttctgtttcacagggctaaagcctgaacaggtggagcggctgatcaaggagttctccatctacatgacaaaagatggccgcatctctgtggcaggggtcacctccagcaacgtgggctaccttgcccatgccattcaccaggtcaccaagtaatgtccctggtgcgaggaaacagagacaacctttctgtcttcagcctctgctattgagagcttcacacagacaatgagagagggtggatggtggtgagtggatcatttctttcagccacagtgtgtaacactcagcatttgaatgtttctcagaaaagaacatgtagtgacacagggcagaggcatccatggctggcgtctggaatattaaaccaaactctccccggtccttttttctccaacttttctcaaagagtttacatgtgcaagaaagtcatcgcaccaaaaaacctgtcaattatgccattgcaatatttcagaagctttaactgaagtgtcaggttcctcgtgagaaacagcacacgttagaggctttgagagaaggcctagttctgtcatgagtagtcggcctcgtgtctgtcctcccatcttggaacaaccttatcaacaggccgcactgcagaaatgatgttttatgaaaaccaatgaggctgctgccactccagcaagggaaataatgcagtttcctgtcttatttaagaaaaagagaaggctctcttttctcccttgtcattgccgttcttttccttacacgcaaagattttttaactattgcagattttcatcccattctactgcttgattgaccatcaactccatcctatcgagatttatttaagaatgaagaacataattttctgctgatgccgtaccctcacccttttcagcaaagaatagtggagagtaggaaactgtactttatctcggcatcctcttgaatgatagtgcaagtttctccagttgggatgttgtctctgcccggttggacctcctccctttgttgaatgtggtgtgcagcctctcatctcacactgtgagtccagcggcgcagggtggtaccaggaaagaggatattcaaccaccatctgctctaaccatgtagacttattgcggcctggtttctctgttacaataaaattactgtagacccaa

SEQ ID NO: 515 - DNA, 2465 bp, Homo sapiens
ggcccagcacgcggccgctctggcccagggaagtccctgtccttaccttcagcaggagccggttccctgtgtgtgtgtccgctcgccctctgctccgtcctgcggctgcccactgccctcctacggtccaccatggccctgctgcactccggccgcgtcctccccgggatcgccgccgccttccacccgggcctcgccgccgcggcctctgccagagccagctcctggtggacccatgtggaaatgggacctccagatcccattctgggagtcactgaagcctttaagagggacaccaatagcaaaaagatgaatctgggagttggtgcctaccgggatgataacggaaagccttacgtgctgcctagcgtccgcaaggcagaggcccagattgccgcaaaaaatttggacaaggaatacctgcccattgggggactggctgaattttgcaaggcatctgcagaactagccctgggtgagaacagcgaagtcttgaagagtggccggtttgtcactgtgcagaccatttctggaactggagccttaaggatcggagccagttttctgcaaagattttttaagttcagccgagatgtctttctgcccaaaccaacctggggaaaccacacacccatcttcagggatgctggcatgcagctacaaggttatcggtattatgaccccaagacttgcggttttgacttcacaggcgctgtggaggatatttcaaaaataccagagcagagtgttcttcttctgcatgcctgcgcccacaatcccacgggagtggacccgcgtccggaacagtggaaggaaatagcaacagtggtgaagaaaaggaatctctttgcgttctttgacatggcctaccaaggctttgccagtggtgatggtgataaggatgcctgggctgtgcgccacttcatcgaacagggcattaatgtttgtctctgccaatcatatgccaagaacatgggcttatatggtgagcgtgtaggagccttcactatggtctgcaaagatgcggatgaagccaaaagggtagagtcacagttgaagatcttgatccgtcccatgtattccaaccctcccctcaatggggcccggattgctgctgccattctgaacaccccagatttgcgaaaacaatggctgcaagaagtgaaaggcatggctgaccgcatcattggcatgcggactcaactggtctccaacctcaagaaggagggttccacccacaattggcaacacatcaccgaccaaattggcatgttctgtttcacagggctaaagcctgaacaggtggagcggctgatcaaggagttctccatctacatgacaaaagatggccgcatctctgtggcaggggtcacctccagcaacgtgggctaccttgcccatgccattcaccaggtcaccaagtaatgtccctggtgcgaggaaacagagacaacctttctgtcttcagcctctgctattgagagcttcacacagacaatgagagagggtggatggtggtgagtggatcatttctttcagccacagtgtgtaacactcagcatttgaatgtttctcagaaaagaacatgtagtgacacagggcagaggcatccatggctggcgtctggaatattaaaccaaactctccccggtccttttttctccaacttttctcaaagagtttacatgtgcaagaaagtcatcgcaccaaaaaacctgtcaattatgccattgcaatatttcagaagctttaactgaagtgtcaggttcctcgtgagaaacagcacacgttagaggctttgagagaaggcctagttctgtcatgagtagtcggcctcgtgtctgtcctcccatcttggaacaaccttatcaacaggccgcactgcagaaatgatgttttatgaaaaccaatgaggctgctgccactccagcaagggaaataatgcagtttcctgtcttatttaagaaaaagagaaggctctcttttctcccttgtcattgccgttcttttccttacacgcaaagattttttaactattgcagattttcatcccattctactgcttgattgaccatcaactccatcctatcgagatttatttaagaatgaagaacataattttctgctgatgccgtaccctcacccttttcagcaaagaatagtggagagtaggaaactgtactttatctcggcatcctcttgaatgatagtgcaagtttctccagttgggatgttgtctctgcccggttggacctcctccctttgttgaatgtggtgtgcagcctctcatctcacactgtgagtccagcggcgcagggtggtaccaggaaagaggatattctaggctttgcgtgctgctagctgggttcaggcttcacccactggaaagaaccaccatctgctctaaccatgtagacttattgcggcctggtttctctgttacaataaaattactgtagacccaa

SEQ ID NO: 516 - DNA, 3663 bp, Homo sapiens
agcaaccacagggcctgggactggggggttcccagatccttgaagctcactccgcctcctcactctcactgcatttcccaccttcctgtgggccttgcggcatcttcatcactgaggcacctggttacgcttcacctcttgtttcctgccctcactgcattccctcacctctacctttttatccttccaccctaggcttctctcctccctcttccctcactcctgactcttcctcttcccagcggacggctggaggaccgctcagtctctcctctctcacttcccttcctctctctcaccttcaccacccaacacctccctccctgcctctttctttctgctccctcattctctccccaccactctcttctcgtggcccccttgcccgcgcgccctcttcccttccccttgcctcactctctcagctttcttcccacagttgagctcgggcagctctttctggggatagctatggggctttgggggaagaaagggacagtggctccccatgaccagagtccaagacgaagacctaaaaaagggcttatcaagaaaaaaatggtgaagagggaaaaacagaagcgcaatatggaggaactgaagaaggaagtggtcatggatgatcacaaattaaccttggaagagctgagcaccaagtactccgtggacctgacaaagggccatagccaccaaagggcaaaggaaatcctgactcgagatggacccaatactgttaccccaccccccaccactccagaatgggtcaaattctgtaagcaactgttcggaggcttctccctcctactatggactggggccattctctgctttgtggcctacagcatccagatatatttcaatgaggagcctaccaaagacaacctctacctgagcatcgtactgtccgtcgtggtcatcgtcactggctgcttctcctattatcaggaggccaagagctccaagatcatggagtcttttaagaacatggtgcctcagcaagctctggtaattcgaggaggagagaagatgcaaattaatgtacaagaggtggtgttgggagacctggtggaaatcaagggtggagaccgagtccctgctgacctccggcttatctctgcacaaggatgtaaggtggacaactcatccttgactggggagtcagaaccccagagccgctcccctgacttcacccatgagaaccctctggagacccgaaacatctgcttcttttccaccaactgtgtggaaggaaccgcccggggtattgtgattgctacgggagactccacagtgatgggcagaattgcctccctgacgtcaggcctggcggttggccagacacctatcgctgctgagatcgaacacttcatccatctgatcactgtggtggccgtcttccttggtgtcactttttttgcgctctcacttctcttgggctatggttggctggaggctatcatttttctcattggcatcattgtggccaatgtgcctgaggggctgttggctacagtcactgtgtgcctgaccctcacagccaagcgcatggcgcggaagaactgcctggtgaagaacctggaggcggtggagacgctgggctccacgtccaccatctgctcagacaagacgggcaccctcacccagaaccgcatgaccgtcgcccacatgtggtttgatatgaccgtgtatgaggccgacaccactgaagaacagactggaaaaacatttaccaagagctctgatacctggtttatgctggcccgaatcgctggcctctgcaaccgggctgactttaaggctaatcaggagatcctgcccattgctaagagggccacaacaggtgatgcttccgagtcagccctcctcaagttcatcgagcagtcttacagctctgtggcggagatgagagagaaaaaccccaaggtggcagagattccctttaattctaccaacaagtaccagatgtccatccaccttcgggaggacagctcccagacccacgtactgatgatgaagggtgctccggagaggatcttggagttttgttctacctttcttctgaatgggcaggagtactcaatgaacgatgaaatgaaggaagccttccaaaatgcctatttagaactgggaggtctgggggaacgtgtgctaggcttctgcttcttgaatctgcctagcagcttctccaagggattcccatttaatacagatgaaataaatttccccatggacaacctttgttttgtgggcctcatatccatgattgaccctccccgagctgcagtgcctgatgctgtgagcaagtgtcgcagtgcaggaattaaggtgatcatggtaacaggagatcatcccattacagctaaggccattgccaagggtgtgggcatcatctcagaaggcactgagacggcagaggaagtcgctgcccggcttaagatccctatcagcaaggtcgatgccagtgctgccaaagccattgtggtgcatggtgcagaactgaaggacatacagtccaagcagcttgatcagatcctccagaaccaccctgagatcgtgtttgctcggacctcccctcagcagaagctcatcattgtcgagggatgtcagaggctgggagccgttgtggccgtgacaggtgacggggtgaacgactcccctgcgctgaagaaggctgacattggcattgccatgggcatctctggctctgacgtctctaagcaggcagccgacatgatcctgctggatgacaactttgcctccatcgtcacgggggtggaggagggccgcctgatctttgacaacctgaagaaatccatcatgtacaccctgaccagcaacatccccgagatcacgcccttcctgatgttcatcatcctcggtatacccctgcctctgggaaccataaccatcctctgcattgatctcggcactgacatggtccctgccatctccttggcttatgagtcagctgaaagcgacatcatgaagaggcttccaaggaacccaaagacggataatctggtgaaccaccgtctcattggcatggcctatggacagattgggatgatccaggctctggctggattctttacctactttgtaatcctggctgagaatggttttaggcctgttgatctgctgggcatccgcctccactgggaagataaatacttgaatgacctggaggacagctacggacagcagtggacctatgagcaacgaaaagttgtggagttcacatgccaaacggccttttttgtcaccatcgtggttgtgcagtgggcggatctcatcatctccaagactcgccgcaactcacttttccagcagggcatgagaaacaaagtcttaatatttgggatcctggaggagacactcttggctgcatttctgtcctacactccaggcatggacgtggccctgcgaatgtacccactcaagataacctggtggctctgtgccattccctacagtattctcatcttcgtctatgatgaaatcagaaaactcctcatccgtcagcacccggatggctgggtggaaagggagacgtactactaaactcagcagatgaagagcttcatgtgacacaggggtgttgtgagagctgggatggggccagagattataagtttgacacaacatctgagacactaggatgaa

SEQ ID NO: 517 - DNA, 861 bp, Homo sapiens
gccatctccttcgccaaggacttcctagctggaggcatcaccgccgctatctccaagacagccgtggcatcgatcaagcgggtccagctgctgctgcagatgcagcacgccagcatgccgatggccgccgccaagcagtgcaagggcatcgtggactgcatcgtccgcatccccaaagatcagggcgtgctgtccttctggaggggcaacctggccaatgtcatccgctactcccccacgcaagccctcaatttcgccttcaaggataagtacaagcagatcttcctggcgggcgtggacaagcacacgcagttctgcaggtactttgcgggcaacctggcctctggcggcacggccgtcgtgtatcccctggatttcaccagaacccgcctggcagccgacgtgggaaagtcaggcacggagcgcgagttccgaggcctgggagactgcctagtgaagatcagcaagtccgacggcatccggggcctttaccagggcttcagcgtctccgtgcaggccatcatcatctaccaggcagcctacttcagggtgtacgatacggccaatggcatgttccccgaccccaagaacacacacatcctggtgagctggatgaccgcgcagaccgtgacggccgtggctggcgtgctctcctaccccttcgacacagtgcggcggcggacgatgatgcagtcccggcgcaaaggagctgacatcatgtacacgggcaccgtcgactgttggaggaagatcttcagagacgagcggggcgaggcctttttcaagggtgtgtggtccaacgccctcagaggcatgggggtgggggcgggcttcgtgctggtcctgtacgacgagctgaag

SEQ ID NO: 518 - DNA, 1583 bp, Homo sapiens
cacggatcggcagcgggactgagccgcgcccacgtggaagccgccgcaggcttcgcgcggggccccccgggtgcacgcgggcaggggccggggtctcccgacgcacgaccccggagagtgttaaaagggtcggagctgcccggaggcggcggcagggctgagccagcgacgccctccattcactctccgcgcccgttctccggctgtcctcccgttccgctgcccgccctgccaccatgacggaacaggccatctccttcgccaaagacttcttggccggaggcatcgccgccgccatctccaagacggccgtggctccgatcgagcgggtcaagctgctgctgcaggtccagcacgccagcaagcagatcgccgccgacaagcagtacaagggcatcgtggactgcattgtccgcatccccaaggagcagggcgtgctgtccttctggaggggcaaccttgccaacgtcattcgctacttccccactcaagccctcaacttcgccttcaaggataagtacaagcagatcttcctggggggcgtggacaagcacacgcagttctggaggtactttgcgggcaacctggcctccggcggtgcggccggcgcgacctccctctgcttcgtgtacccgctggattttgccagaacccgcctggcagcggacgtgggaaagtcaggcacagagcgcgagttccgaggcctgggagactgcctggtgaagatcaccaagtccgacggcatccggggcctgtaccagggcttcagtgtctccgtgcagggcatcatcatctaccgggcggcctacttcggcgtgtacgatacggccaagggcatgctccccgaccccaagaacacgcacatcgtggtgagctggatgatcgcgcagaccgtgacggccgtggccggcgtggtgtcctaccccttcgacacggtgcggcggcgcatgatgatgcagtccgggcgcaaaggagctgacatcatgtacacgggcaccgtcgactgttggaggaagatcttcagagatgaggggggcaaggccttcttcaagggtgcgtggtccaacgtcctgcggggcatggggggcgccttcgtgctggtcctgtacgacgagctcaagaaggtgatctaagggccgcggcctcctccacacacacacacacaccaggggaaccaagagaaccacgtagaatcctcaaccgtgcggaccatcaaccttcgagaaattccagttgtctttttcccagccgcatcctgcctgtagatggccggggaaggctctagaaaaggggcgcattgcgatccaaccatcggcagccgattccgtgtcttgatcacggggtgggagggaaccgtggcgtccctgcgtggggcccatgggtgagacactccagtactgagacctagagtccagatgcttgtaggagccaagtcgtgttctaagtatttatttaaaacaaaagaatcacgttttcccatttgtacttcagcgctagcccctgttttgcacagccgagtactggcgagtatgttctatgttgggcctcctgctgcaaaacaataaacagaggacgcagaggtc

SEQ ID NO: 519 - DNA, 4211 bp, Homo sapiens
cggagagcgcgagggaggagattctgagcgagggaggggagcgcgcccgggcagcagtgcgtgcgctcctcccggcgccacaagctcgccccgcgcagcccgagccgggctgggcgctgtcctcgggggcctggggaaccgcgcggtttggagatcggaggcacctggaacccgtggcaagcgccgagccgggagacagcccgaggaaccacgggttctggagctaggagccggaagctgggagtccggaggagagcggagcccggagcccggagcccggggcggcgcgtctgggtctggcgcttcccgactggacggcgcgcccgctggtcttcgccacgcgccctcccctgggctcccgttcatcggtccccgcctgagacgcgcccactcctgcccggacttccagccccggaggcgccggacagagccgcggactccagcgcccaccatgcgcctcaacagctccgcgccgggaaccccgggcacgccggccgccgaccccttccagcgggcgcaggccggactggaggaggcgctgctggccccgggcttcggcaacgcttcgggcaacgcgtcggagcgcgtcctggcggcacccagcagcgagctggacgtgaacaccgacatctactccaaggtgctggtgaccgccgtgtacctggtgctcttcgtggtgggcacggtgggcaacacggtgacggcgttcacgctggcgcggaagaagtcgctgcagagcctgcagagcacggtgcattaccacctgggcagcctggcgctgtccgacctgctcaccctgctgctggccatgcccgtggagctgtacaacttcatctgggtgcaccacccctgggccttcggcgacgccggctgccgcggctactacttcctgcgcgacgcctgcacctacgccacggccctcaacgtggccagcctgagtgtggagcgctacctggccatctgccaccccttcaaggccaagaccctcatgtcccgaagccgcaccaagaagttcatcagcgccatctggctcgcctcggccctgctggcggtgcctatgctgttcaccatgggcgagcagaaccgcagcgccgacggccagcacgccggcggcctggtgtgcacccccaccatccacactgccaccgtcaaggtcgtcatacaggtcaacaccttcatgtccttcatattccccatggtggtcatctcggtcctgaacaccatcatcgccaacaagctgaccgtcatggtacgccaggcggccgagcagggccaagtgtgcacggtcgggggcgagcacagcacattcagcatggccatcgagcctggcagggtccaggccctgcggcacggcgtgcgcgtcctacgtgcagtggtcatcgcctttgtggtctgctggctgccctaccacgtgcggcgcctcatgttctgctacatctcggatgagcagtggactccgttcctctatgacttctaccactacttctacatggtgaccaacgcactcttctacgtcagctccaccatcaaccccatcctgtacaacctcgtctctgccaacttccgccacatcttcctggccacactggcctgcctctgcccggtgtggcggcgcaggaggaagaggccagccttctcgaggaaggccgacagcgtgtccagcaaccacaccctctccagcaatgccacccgcgagacgctgtactaggctgtgcgccccggaacgtgtccaggaggagcctggccatgggtccttgcccccgacagacagagcagcccccacccgggagccttgatgggggtcaggcagaggccagcctgcactggagtctgaggcctgggacccccccctcccaccccctaacccatgtttctcattagtgtctcccgggcctgtccccaactcctccccacccctcccccatctcctctttgaaagccagaacaagagagcgctcctctcccagataggaaaagggcctctaacaaggagaaattagtgtgcggcaaaaggcagttttctttgttctcagactaatggatggttccagagaaggaaatgaaaggtgctgggtggggccgggcctccggcggcccggctgctgttcccatgtccacatctctgaggcctgcaccccctctgtctagctcggggagtccagccccagtcccgcaggctccgtggctttgggcctcacgtgcagaccctgccatgcagacccatgcccccctcccccaggcagctccaagaaagctccctgactcgccccttcaggcctggcaagctgggggcccatcgccgtggggagtccctcccaccaccctcgccgcaggcagctgcagcccccagaggggaccacaagcccaaaaaggacaaaaatgggctggcctggaatggcccagaccccagcctcccctcctccctcccatcctcacccaggccaaggcccaggggctctgccaggacaccacatgggagggggctcaggcctcagcctcaagatcttcagctgtggcctctcgggctcggcagaagggacgccggatcaggggcctggtctccagcacctgcccgagtggccgtggccaggatggggtgcgcattccgtgtgctttgcttgtggctgtgcaggctgaggtctggagccaggcccagagctggcttcagggtggggccttgagaaggggaatgtgggacaggggcgatggtgcctggtctctgagtaagatgccaggtcccaggaactcaggcttcaggtgagaaggagcggtgtgtccaggcaccgctggccggcagccctgggctgaggcacagactcatttgtcaccttctggcggcggcagccctggccccggcctccaagcagttgaaaaagctggcgcctccttggtctctaggatccaggctccacagagcacatgactagccaggcccctggcttaagaaggtcgcctaagcctaagagaagacagtcccaggagaagctggccgggaccagccaggagctgggagccacaggaagcaaaagtcagccttttcttcaagggatttccctgtctcagagcagcctttgccccagggaaatgggctctgggctggctgcctgcaccggccatgtcgacccaggacccggacacctggtcttgggctgtgttcagccactttgccttctctggactcagtttccccgtctgagaaatgagagtcgaatgctacagtatctgcagtcgcttggatctggctgttgagttgacgggttccttgaaccccacaaaatccctctccaaccacaggacccttcggctcaccaagaacggggcccaggggagtcaggcctattcgctgcacttcctgccaaactttgcccccacaagcctggtcatcagccaggcagccctcccagtgcccaagggccaccaaccccagggaaacagggccagcacagaggggccttcctcccccacagagctcccatgacatagtctgctctgggcggaagagctttgctgccagccagggatgtccagaggtcggtgcagcccctatccctgctcaggagtgggctcagagtctagcaaatgctaaggcccctcaggctgggctctgaacgaggacctggactcagagccagacagggcagcctcagacccttctctggggctcctggaccttgggccataatttctgagcctcggtttccccatctaaggaacagatgtggtcgttccgccctctcagctggatgagactgtcctggaggatccaccccggaacagacagaatggtgtctctcaggatggtgctctgagagagggcagagtggatgccccactgccctagaccctcggtagacgtggggtctctggggcggggtctgtggctgtgactgaagtcggctttcccgttgatgtcttgatgctcctatctgtgcacttaccgtaggtagggacacgtgtccatgcaccacagacacacccacgacacctgatctcgtatcactagcttgcggccaggtcatgatgtggccccggaagctggccctgcgtgccatgagtgcgtcggtcatggagtccggagcccctgagccggcccctggtgacggcacagccctcacagctcaaacgcccacccccactcccaccatctgcaggtggtgaaaacaaaccccgtgtatctctcaataaaggtggccgaagggcctcgatgtgga

SEQ ID NO: 520 - DNA, 4131 bp, Homo sapiens
tcaagctcgccccgcgcagcccgagccgggctgggcgctgtcctcgggggcctggggaaccgcgcggtttggagatcggaggcacctggaacccgtggcaagcgccgagccgggagacagcccgaggaaccacgggttctggagctaggagccggaagctgggagtccggaggagagcggagcccggagcccggagcccggggcggcgcgtctgggtctggcgcttcccgactggacggcgcgcccgctggtcttcgccacgcgccctcccctgggctcgcgttcatcggtccccgcctgagacgcgcccactcctgcccggacttccagccccggaggcgccggacagagccgcggactccagcgcccaccatgcgcctcaacagctccgcgccgggaaccccgggcacgccggccgccgaccccttccagcgggcgcaggccggactggaggaggcgctgctggccccgggcttcggcaacgcttcgggcaacgcgtcggagcgcgtcctggcggcacccagcagcgagctggacgtgaacaccgacatctactccaaagtgctggtgaccgccgtgtacctggcgctcttcgtggtgggcacggtgggcaacacggtgacggcgttcacgctggcgcggaagaagtcgctgcagagcctgcagagcacggtgcattaccacctgggcagcctggcgctgtccgacctgctcaccctgctgctggccatgcccgtggagctgtacaacttcatctgggtgcaccacccctgggccttcggcgacgccggctgccgcggctactacttcctgcgcgacgcctgcacctacgccacggccctcaacgtggccagcctgagtgtggagcgctacctggccatctgccaccccttcaaggccaagaccctcatgtcccgaagccgcaccaagaagttcatcagcgccatctggctcgcctcggccctgctgacggtgcctatgctgttcaccatgggcgagcagaaccgcagcgccgacggccagcacgccggcggcctggtgtgcacccccaccatccacactgccaccgtcaaggtcgtcatacaggtcaacaccttcatgtccttcatattccccatggtggtcatctcggtcctgaacaccatcatcgccaacaagctgaccgtcatggtacgccaggcggccgagcagggccaagtgtgcacggtcgggggcgagcacagcacattcagcatggccatcgagcctggcagggtccaggccctgcggcacggcgtgcgcgtcctacgtgcagtggtcatcgcctttgtggtctgctggctgccctaccacgtgcggcgcctcatgttctgctacatctcggatgagcagtggactccgttcctctatgacttctaccactacttctacatggtgaccaacgcactcttctacgtcagctccaccatcaaccccatcctgtacaacctcgtctctgccaacttccgccacatcttcctggccacactggcctgcctctgcccggtgtggcggcgcaggaggaagaggccagccttctcgaggaaggccgacagcgtgtccagcaaccacaccctctccagcaatgccacccgcgagacgctgtactaggctgtgcgccccggaacgtgtccaggaggagcctggccatgggtccttgcccccgacagacagagcagcccccacccgggagccttgatgggggtcaggcagaggccagcctgcactggagtctgaggcctgggacccccccctcccaccccctaacccatgtttctcattagtgtctcccgggcctgtccccaactcctccccacccctcccccatctcctctttgaaagccagaacaagagagcgctcctctcccagataggaaaagggcctctaacaaggagaaattagtgtgcggcaaaaggcagttttctttgttctcagactaatggatggttccagagaaggaaatgaaatgtgctgggtggggccgggcctccggcggcccggctgctgttcccatgtccacatctctgaggcctgcaccccctctgtctagctcggggagtccagccccagtcccgcaggctccgtggctttgggcctcacgtgcagaccctgccatgcagacccatgcccccctcccccaggcagctccaagaaagctccctgactcgccccttcaggcctggcaagctgggggcccatcgccgtggggagtccctcccaccaccctcgccgcaggcagctgcagcccccagaggggaccacaagcccaaaaaggacaaaaatgggctggcctggaatggcccagaccccagcctcccctcctccctcccatcctcacccaggccaaggcccaggggctctgccaggacaccacatgggagggggctcaggcctcagcctcaagatcttcagctgtggcctctcgggctcggcagaagggacgccggatcaggggcctggtctccagcacctgcccgagtggccgtggccaggatggggtgcgcattccgtgtgctttgcttgtagctgtgcaggctgaggtctggagccaggcccagagctggcttcagggtggggccttgagaaggggaatgtgggacaggggcgatggtgcctggtctctgagtaagatgccaggtcccaggaactcaggcttcaggtgagaaggagcggtgtgtccaggcaccgctggccggcagccctgggctgaggcacagactcatttgtcaccttctggcggcggcagccctggccccggcctccaagcagttgaaaaagctggcgcctccttggtctctaggatccaggctccacagagcacatgactagccaggcccctggcttaagaaggtcgcctaagcctaagagaagacagtcccaggagaagctggccgggaccagccaggagctgggagccacaggaagcaaaagtcagccttttcttcaagggatttccctgtctcagagcagcctttgccccagggaaatgggctctgggctggctgcctgcaccggccatgtcgacccaggacccggacacctggtcttgggctgtgttcagccactttgccttctctggactcagtttccccgtctgagaaatgagagtcgaatgctacagtatctgcagtcgcttggatctggctgttgagttgacgggttccttgaaccccacaaaatccctctccaaccacaggacccttcggctcaccaagaacggggcccaggggagtcaggcctattcgctgcacttcctgccaaactttgcccccacaagcctggtcatcagccaggcagccctcccagtgcccaagggccaccaaccccagggaaacagggccagcacagaggggccttcctcccccacagagctcccatgacatagtctgctctgggcggaagagctttgctgccagccagggatgtccagaggtcggtgcagcccctatccctgctcaggagtgggctcagagtctagcaaatgctaaggcccctcaggctgggctctgaacgaggacctggactcagagccagacagggcagcctcagacccttctctggggctcctggaccttgggccataatttctgagcctcggtttccccatctaaggaacagatgtggtcgttccgccctctcagctggatgagactgtcctggaggatccaccccggaacagacagaacggtgtctctcaggatggtgctctgagagagggcagagtggatgccccactgccctagaccctcggtagacgtggggtctctggggcggggtctgtggctgtgactgaagtcggctttcccgttgatgtcttgatgctcctatctgtgcacttaccgtaggtagggacacgtgtccatgcaccacagacacacccacgacacctgatctcgtatcactagcttgcggccaggtcatgatgtggccccggaagctggccctgcgtgccatgagtgcgtcggtcatggagtccggagcccctgagccggcccctggtgacggcacagccctcacagctcaaacgcccacccccactcccaccatctgcaggtggtgaaaacaaaccccgtgtatctctcaataaaggtggccgaagggcctcgatgtgg

SEQ ID NO: 521 - DNA, 2589 bp, Homo sapiens
cgcccgcagagccgccccaggtgcctgggtgttgtgtgattgacgcggggaaggaggggtcagccgatccctccccaaccctccatcccatccctgaggattgggctggtacccgcgtctctcggacagatgcctgaggaagtgcaccatggagaggaggaggtggagacttttgcctttcaggcagaaattgcccaactcatgtccctcatcatcaataccttctattccaacaaggagattttccttcgggagttgatctctaatgcttctgatgccttggacaagattcgctatgagagcctgacagacccttcgaagttggacagtggtaaagagctgaaaattgacatcatccccaaccctcaggaacgtaccctgactttggtagacacaggcattggcatgaccaaagctgatctcataaataatttgggaaccattgccaagtctggtactaaagcattcatggaggctcttcaggctggtgcagacatctccatgattgggcagtttggtgttggcttttattctgcctacttggtggcagagaaagtggttgtgatcacaaagcacaacgatgatgaacagtatgcttgggagtcttctgctggaggttccttcactgtgcgtgctgaccatggtgagcccattggcaggggtaccaaagtgatcctccatcttaaagaagatcagacagagtacctagaagagaggcgggtcaaagaagtagtgaagaagcattctcagttcataggctatcccatcaccctttatttggagaaggaacgagagaaggaaattagtgatgatgaggcagaggaagagaaaggtgagaaagaagaggaagataaagatgatgaagaaaaacccaagatcgaagatgtgggttcagatgaggaggatgacagcggtaaggataagaagaagaaaactaagaagatcaaagagaaatacattgatcaggaagaactaaacaagaccaagcctatttggaccagaaaccctgatgacatcacccaagaggagtatggagaattctacaagagcctcactaatgactgggaagaccacttggcagtcaagcacttttctgtagaaggtcagttggaattcagggcattgctatttattcctcgtcgggctccctttgacctttttgagaacaagaagaaaaagaacaacatcaaactctatgtccgccgtgtgttcatcatggacagctgtgatgagttgataccagagtatctcaattttatccgtggtgtggttgactctgaggatctgcccctgaacatctcccgagaaatgctccagcagagcaaaatcttgaaagtcattcgcaaaaacattgttaagaagtgccttgagctcttctctgagctggcagaagacaaggagaattacaagaaattctatgaggcattctctaaaaatctcaagcttggaatccacgaagactccactaaccgccgccgcctgtctgagctgctgcgctatcatacctcccagtctggagatgagatgacatctctgtcagagtatgtttctcgcatgaaggagacacagaagtccatctattacatcactggtgagagcaaagagcaggtggccaactcagcttttgtggagcgagtgcggaaacggggcttcgaggtggtatatatgaccgagcccattgacgagtactgtgtgcagcagctcaaggaatttgatgggaagagcctggtctcagttaccaaggagggtctggagctgcctgaggatgaggaggagaagaagaagatggaagagagcaaggcaaagtttgagaacctctgcaagctcatgaaagaaatcttagataagaaggttgagaaggtgacaatctccaatagacttgtgtcttcaccttgctgcattgtgaccagcacctacggctggacagccaatatggagcggatcatgaaagcccaggcacttcgggacaactccaccatgggctatatgatggccaaaaagcacctggagatcaaccctgaccaccccattgtggagacgctgcggcagaaggctgaggccgacaagaatgataaggcagttaaggacctggtggtgctgctgtttgaaaccgccctgctatcttctggcttttcccttgaggatccccagacccactccaaccgcatctatcgcatgatcaagctaggtctaggtattgatgaagatgaagtggcagcagaggaacccaatgctgcagttcctgatgagatcccccctctcgagggcgatgaggatgcgtctcgcatggaagaagtcgattaggttaggagttcatagttggaaaacttgtgcccttgtatagtgtccccatgggctcccactgcagcctcgagtgcccctgtcccacctggctccccctgctggtgtctagtgtttttttccctctcctgtccttgtgttgaaggcagtaaactaagggtgtcaagccccattccctctctactcttgacagcaggattggatgttgtgtattgtggtttattttattttcttcattttgttctgaaattaaagtatgcaaaataaagaatatgccgtttttataca

SEQ ID NO: 522 - DNA, 2590 bp, Homo sapiens
gccttatatagggcgacttggggcacgcagtagctctctcgagtcactccggcgcagtgttgggactgtctgggtatcggaaagcaagcctacgttgctcactattacgtataatccttttcttttcaagatgcctgaggaagtgcaccatggagaggaggaggtggagacttttgcctttcaggcagaaattgcccaactcatgtccctcatcatcaataccttctattccaacaaggagattttccttcgggagttgatctctaatgcttctgatgccttggacaagattcgctatgagagcctgacagacccttcgaagttggacagtggtaaagagctgaaaattgacatcatccccaaccctcaggaacgtaccctgactttggtagacacaggcattggcatgaccaaagctgatctcataaataatttgggaaccattgccaagtctggtactaaagcattcatggaggctcttcaggctggtgcagacatctccatgattgggcagtttggtgttggcttttattctgcctacttggtggcagagaaagtggttgtgatcacaaagcacaacgatgatgaacagtatgcttgggagtcttctgctggaggttccttcactgtgcgtgctgaccatggtgagcccattggcaggggtaccaaagtgatcctccatcttaaagaagatcagacagagtacctagaagagaggcgggtcaaagaagtagtgaagaagcattctcagttcataggctatcccatcaccctttatttggagaaggaacgagagaaggaaattagtgatgatgaggcagaggaagagaaaggtgagaaagaagaggaagataaagatgatgaagaaaaacccaagatcgaagatgtgggttcagatgaggaggatgacagcggtaaggataagaagaagaaaactaagaagatcaaagagaaatacattgatcaggaagaactaaacaagaccaagcctatttggaccagaaaccctgatgacatcacccaagaggagtatggagaattctacaagagcctcactaatgactgggaagaccacttggcagtcaagcacttttctgtagaaggtcagttggaattcagggcattgctatttattcctcgtcgggctccctttgacctttttgagaacaagaagaaaaagaacaacatcaaactctatgtccgccgtgtgttcatcatggacagctgtgatgagttgataccagagtatctcaattttatccgtggtgtggttgactctgaggatctgcccctgaacatctcccgagaaatgctccagcagagcaaaatcttgaaagtcattcgcaaaaacattgttaagaagtgccttgagctcttctctgagctggcagaagacaaggagaattacaagaaattctatgaggcattctctaaaaatctcaagcttggaatccacgaagactccactaaccgccgccgcctgtctgagctgctgcgctatcatacctcccagtctggagatgagatgacatctctgtcagagtatgtttctcgcatgaaggagacacagaagtccatctattacatcactggtgagagcaaagagcaggtggccaactcagcttttgtggagcgagtgcggaaacggggcttcgaggtggtatatatgaccgagcccattgacgagtactgtgtgcagcagctcaaggaatttgatgggaagagcctggtctcagttaccaaggagggtctggagctgcctgaggatgaggaggagaagaagaagatggaagagagcaaggcaaagtttgagaacctctgcaagctcatgaaagaaatcttagataagaaggttgagaaggtgacaatctccaatagacttgtgtcttcaccttgctgcattgtgaccagcacctacggctggacagccaatatggagcggatcatgaaagcccaggcacttcgggacaactccaccatgggctatatgatggccaaaaagcacctggagatcaaccctgaccaccccattgtggagacgctgcggcagaaggctgaggccgacaagaatgataaggcagttaaggacctggtggtgctgctgtttgaaaccgccctgctatcttctggcttttcccttgaggatccccagacccactccaaccgcatctatcgcatgatcaagctaggtctaggtattgatgaagatgaagtggcagcagaggaacccaatgctgcagttcctgatgagatcccccctctcgagggcgatgaggatgcgtctcgcatggaagaagtcgattaggttaggagttcatagttggaaaacttgtgcccttgtatagtgtccccatgggctcccactgcagcctcgagtgcccctgtcccacctggctccccctgctggtgtctagtgtttttttccctctcctgtccttgtgttgaaggcagtaaactaagggtgtcaagccccattccctctctactcttgacagcaggattggatgttgtgtattgtggtttattttattttcttcattttgttctgaaattaaagtatgcaaaataaagaatatgccgtttttataca

SEQ ID NO: 523 - DNA, 3356 bp, Homo sapiens
aggcgcgcggccgcggcggcggctggggagggttcttccggaaggttcgggaggcttctggaaaaagcgccgcgcgctgggcgggcccgtcgctatataaggcaggcgcgggggtggcgcgtcagttgcttcagcgtcccggtgtggctgtgccgttggtcctgtgcggtcacttagccaagatgcctgaggaaacccagacccaagaccaaccgatggaggaggaggaggttgagacgttcgcctttcaggcagaaattgcccagttgatgtcattgatcatcaatactttctactcgaacaaagagatctttctgagagagctcatttcaaattcatcagatgcattggacaaaatccggtatgaaagcttgacagatcccagtaaattagactctgggaaagagctgcatattaaccttataccgaacaaacaagatcgaactctcactattgtggatactggaattggaatgaccaaggctgacttgatcaataaccttggtactatcgccaagtctgggaccaaagcgttcatggaagctttgcaggctggtgcagatatctctatgattggccagttcggtgttggtttttattctgcttatttggttgctgagaaagtaactgtgatcaccaaacataacgatgatgagcagtacgcttgggagtcctcagcagggggatcattcacagtgaggacagacacaggtgaacctatgggtcgtggaacaaaagttatcctacacctgaaagaagaccaaactgagtacttggaggaacgaagaataaaggagattgtgaagaaacattctcagtttattggatatcccattactctttttgtggagaaggaacgtgataaagaagtaagcgatgatgaggctgaagaaaaggaagacaaagaagaagaaaaagaaaaagaagagaaagagtcggaagacaaacctgaaattgaagatgttggttctgatgaggaagaagaaaagaaggatggtgacaagaagaagaagaagaagattaaggaaaagtacatcgatcaagaagagctcaacaaaacaaagcccatctggaccagaaatcccgacgatattactaatgaggagtacggagaattctataagagcttgaccaatgactgggaagatcacttggcagtgaagcatttttcagttgaaggacagttggaattcagagcccttctatttgtcccacgacgtgctccttttgatctgtttgaaaacagaaagaaaaagaacaacatcaaattgtatgtacgcagagttttcatcatggataactgtgaggagctaatccctgaatatctgaacttcattagaggggtggtagactcggaggatctccctctaaacatatcccgtgagatgttgcaacaaagcaaaattttgaaagttatcaggaagaatttggtcaaaaaatgcttagaactctttactgaactggcggaagataaagagaactacaagaaattctatgagcagttctctaaaaacataaagcttggaatacacgaagactctcaaaatcggaagaagctttcagagctgttaaggtactacacatctgcctctggtgatgagatggtttctctcaaggactactgcaccagaatgaaggagaaccagaaacatatctattatatcacaggtgagaccaaggaccaggtagctaactcagcctttgtggaacgtcttcggaaacatggcttagaagtgatctatatgattgagcccattgatgagtactgtgtccaacagctgaaggaatttgaggggaagactttagtgtcagtcaccaaagaaggcctggaacttccagaggatgaagaagagaaaaagaagcaggaagagaaaaaaacaaagtttgagaacctctgcaaaatcatgaaagacatattggagaaaaaagttgaaaaggtggttgtgtcaaaccgattggtgacatctccatgctgtattgtcacaagcacatatggctggacagcaaacatggagagaatcatgaaagctcaagccctaagagacaactcaacaatgggttacatggcagcaaagaaacacctggagataaaccctgaccattccattattgagaccttaaggcaaaaggcagaggctgataagaacgacaagtctgtgaaggatctggtcatcttgctttatgaaactgcgctcctgtcttctggcttcagtctggaagatccccagacacatgctaacaggatctacaggatgatcaaacttggtctgggtattgatgaagatgaccctactgctgatgataccagtgctgctgtaactgaagaaatgccaccccttgaaggagatgacgacacatcacgcatggaagaagtagactaatctctggctgagggatgacttacctgttcagtactctacaattcctctgataatatattttcaaggatgtttttctttatttttgttaatattaaaaagtctgtatggcatgacaactactttaaggggaagataagatttctgtctactaagtgatgctgtgataccttaggcactaaagcagagctagtaatgctttttgagtttcatgttggtttattttcacagattggggtaacgtgcactgtaagacgtatgtaacatgatgttaactttgtgtggtctaaagtgtttagctgtcaagccggatgcctaagtagaccaaatcttgttattgaagtgttctgagctgtatcttgatgtttagaaaagtattcgttacatcttgtaggatctactttttgaacttttcattccctgtagttgacaattctgcatgtactagtcctctagaaataggttaaactgaagcaacttgatggaaggatctctccacagggcttgttttccaaagaaaagtattgtttggaggagcaaagttaaaagcctacctaagcatatcgtaaagctgttcaaaaataactcagacccagtcttgtggatggaaatgtagtgctcgagtcacattctgcttaaagttgtaacaaatacagatgagttaaaagatattgtgtgacagtgtcttatttagggggaaaggggagtatctggatgacagttagtgccaaaatgtaaaacatgaggcgctagcaggagatggttaaacactagctgctccaagggttgacatggtcttcccagcatgtactcagcaggtgtggggtggagcacatgtaggcacagaaaacaggaatgcagacaacatgcatcccctgcgtccatgagttacatgtgttctcttagtgtccacgttgttttgatgttattcatggaataccttctgtgctaaatacagtcacttaattccttggcctt

SEQ ID NO: 524 - DNA, 3635 bp, Homo sapiens
ggcttgtttacggcccgactgcgcaggcgtgctcacctggcgtgctccacccgactgggcgtccgcaggctcctcccccgggtgtggcctccgggcggcatggctgcttcccaggtgatgccggcttcagctagtggggtctagttgaccgttccgcagccgccagggccagcggaaagccggtcagggggaaccgcggcggggctggtgtcatgagcctgaggtgaacttgagggtgcctcctcagcggtctcccgccctgccctgaggggcgccgggaccccaaagagcggaggaagagcgccaccccgacggccaccgcttcggagccagcacgcggggtaccctacggggagcgcggatgcccccgtgttcgggcggggacggctccacccctcctgggccctcccttcgggacagggactgtcccgcccagagtgctgaatacccgcgcgaccgtctggatccccgcccaggaagcccctctgaagcctcctcgccgccgtttctgagaagatgcctgaggaaacccagacccaagaccaaccgatggaggaggaggaggttgagacgttcgcctttcaggcagaaattgcccagttgatgtcattgatcatcaatactttctactcgaacaaagagatctttctgagagagctcatttcaaattcatcagatgcattggacaaaatccggtatgaaagcttgacagatcccagtaaattagactctgggaaagagctgcatattaaccttataccgaacaaacaagatcgaactctcactattgtggatactggaattggaatgaccaaggctgacttgatcaataaccttggtactatcgccaagtctgggaccaaagcgttcatggaagctttgcaggctggtgcagatatctctatgattggccagttcggtgttggtttttattctgcttatttggttgctgagaaagtaactgtgatcaccaaacataacgatgatgagcagtacgcttgggagtcctcagcagggggatcattcacagtgaggacagacacaggtgaacctatgggtcgtggaacaaaagttatcctacacctgaaagaagaccaaactgagtacttggaggaacgaagaataaaggagattgtgaagaaacattctcagtttattggatatcccattactctttttgtggagaaggaacgtgataaagaagtaagcgatgatgaggctgaagaaaaggaagacaaagaagaagaaaaagaaaaagaagagaaagagtcggaagacaaacctgaaattgaagatgttggttctgatgaggaagaagaaaagaaggatggtgacaagaagaagaagaagaagattaaggaaaagtacatcgatcaagaagagctcaacaaaacaaagcccatctggaccagaaatcccgacgatattactaatgaggagtacggagaattctataagagcttgaccaatgactgggaagatcacttggcagtgaagcatttttcagttgaaggacagttggaattcagagcccttctatttgtcccacgacgtgctccttttgatctgtttgaaaacagaaagaaaaagaacaacatcaaattgtatgtacgcagagttttcatcatggataactgtgaggagctaatccctgaatatctgaacttcattagaggggtggtagactcggaggatctccctctaaacatatcccgtgagatgttgcaacaaagcaaaattttgaaagttatcaggaagaatttggtcaaaaaatgcttagaactctttactgaactggcggaagataaagagaactacaagaaattctatgagcagttctctaaaaacataaagcttggaatacacgaagactctcaaaatcggaagaagctttcagagctgttaaggtactacacatctgcctctggtgatgagatggtttctctcaaggactactgcaccagaatgaaggagaaccagaaacatatctattatatcacaggtgagaccaaggaccaggtagctaactcagcctttgtggaacgtcttcggaaacatggcttagaagtgatctatatgattgagcccattgatgagtactgtgtccaacagctgaaggaatttgaggggaagactttagtgtcagtcaccaaagaaggcctggaacttccagaggatgaagaagagaaaaagaagcaggaagagaaaaaaacaaagtttgagaacctctgcaaaatcatgaaagacatattggagaaaaaagttgaaaaggtggttgtgtcaaaccgattggtgacatctccatgctgtattgtcacaagcacatatggctggacagcaaacatggagagaatcatgaaagctcaagccctaagagacaactcaacaatgggttacatggcagcaaagaaacacctggagataaaccctgaccattccattattgagaccttaaggcaaaaggcagaggctgataagaacgacaagtctgtgaaggatctggtcatcttgctttatgaaactgcgctcctgtcttctggcttcagtctggaagatccccagacacatgctaacaggatctacaggatgatcaaacttggtctgggtattgatgaagatgaccctactgctgatgataccagtgctgctgtaactgaagaaatgccaccccttgaaggagatgacgacacatcacgcatggaagaagtagactaatctctggctgaggatgtttttctttatttttgttaatattaaaaagtctgtatggcatgacaactactttaaggggaagataagatttctgtctactaagtgatgctgtgataccttaggcactaaagcagagctagtaatgctttttgagtttcatgttggtttattttcacagattggggtaacgtgcactgtaagacgtatgtaacatgatgttaactttgtgtggtctaaagtgtttagctgtcaagccggatgcctaagtagaccaaatcttgttattgaagtgttctgagctgtatcttgatgtttagaaaagtattcgttacatcttgtaggatctactttttgaacttttcattccctgtagttgacaattctgcatgtactagtcctctagaaataggttaaactgaagcaacttgatggaaggatctctccacagggcttgttttccaaagaaaagtattgtttggaggagcaaagttaaaagcctacctaagcatatcgtaaagctgttcaaaaataactcagacccagtcttgtggatggaaatgtagtgctcgagtcacattctgcttaaagttgtaacaaatacagatgagttaaaagatattgtgtgacagtgtcttatttagggggaaaggggagtatctggatgacagttagtgccaaaatgtaaaacatgaggcgctagcaggagatggttaaacactagctgctccaagggttgacatggtcttcccagcatgtactcagcaggtgtggggtggagcacatgtaggcacagaaaacaggaatgcagacaacatgcatcccctgcgtccatgagttacatgtgttctcttagtgtccacgttgttttgatgttattcatggaataccttctgtgctaaatacagtcacttaattccttggcc

SEQ ID NO: 525 - DNA, 5484 bp, Homo sapiens
attcctgccgctgccgccgccgccgccgaggtcccgcaccagccatggcgcagatcctccctgttcgctttcaggagcacttccagctccaaaaccttggaattaatccagctaacattggattcagcacactgaccatggaatctgacaagttcatatgtatccgagagaaagttggtgagcaggcacaggtcacgatcattgacatgagtgacccaatggctccgatccgacggcctatctctgcagagagtgccatcatgaatccagcctctaaggtgatagctctgaaagctgggaagacacttcagatctttaatattgagatgaagagtaaaatgaaggctcatactatggcagaagaagtgattttctggaaatgggtttctgtgaacactgttgccttggtgaccgagaccgcggtctaccactggagcatggaaggtgactcccagcccatgaagatgtttgatagacataccagtctggtgggctgccaggtgattcactaccggactgatgagtaccagaagtggctgctgctcgtaggcatctcggctcagcaaaaccgtgtggttggagcaatgcagctctactctgtggataggaaggtttcacaacccatagaaggccatgctgcggcttttgcagagttcaagatggaggggaatgccaagcctgccacccttttctgctttgctgtacgtaatcccacaggaggcaagttgcacatcattgaagttggacagcctgcagcgggaaaccaaccttttgtaaagaaagcagtagatgtgttttttcctccagaggcacagaatgattttccagtggctatgcagattggagctaaacatggtgttatttacttgatcacaaagtatggctatcttcatctgtacgacctagagtctggcgtgtgcatctgcatgaaccgtattagtgctgacacaatatttgtcactgctccacacaaaccaacctctggaattattggtgtcaacaaaaagggacaggtactgtcagtttgtgttgaggaagataacattgtgaattatgcaaccaacgtgcttcagaatccagaccttggtctgcgtttggccgttcgtagtaacctggctggggcagagaagttgtttgtgagaaaattcaataccctctttgcacagggcagctatgctgaagccgccaaagttgcagcgtctgcaccaaagggaatcctgcgtaccagagagacggtccagaaattccagagtatacccgctcagtctggccaggcttctccattgctgcagtacttcggaatcctgctcgaccagggtcagctcaataaacttgaatccttagaactttgccatctggttcttcagcaggggcgtaagcaactcctagagaagtggctgaaagaagataagctggagtgctcagaggagctcggagacttggtcaaaaccactgaccccatgctcgctctgagtgtgtaccttcgggcaaatgtgccaagcaaagtgatccagtgttttgcagaaacaggccaattccagaaaattgtgctctatgccaaaaaggttgggtacaccccagactggatctttctgctgaggggtgtaatgaagatcagtccggaacagggcctgcagttttctcgaatgctagtgcaggacgaggagccgctggccaacattagccagattgtggacattttcatggaaaacagtttaattcagcagtgtacttccttcttattggatgccttgaagaataatcgcccagctgagggactcctgcagacatggctgttggagatgaaccttgttcatgcaccccaggttgcagatgccatccttggaaataaaatgtttactcattacgaccgggcccacattgcccagctctgtgagaaggcaggcctcctgcagcaagcactggagcactacaccgacctctatgacatcaagagggctgtggtccacactcacctcctcaatcccgagtggcttgtcaatttctttggctccttatcggtggaggattctgtggagtgtctgcatgccatgctgtctgctaacatcagacagaaccttcagctgtgtgtgcaggtggcctctaagtaccacgagcagctgggcacgcaggccctggtggagctctttgaatccttcaagagttacaaaggcctcttctacttcctgggctcaatcgtgaacttcagccaagacccagatgtgcatctgaaatacattcaggctgcctgtaagacagggcagatcaaggaggtggagaggatatgccgagagagcagctgctacaacccagagcgtgtgaagaacttcctgaaggaggccaagctcacagaccagcttcccctcatcatcgtgtgtgatcgttttggctttgtccatgaccttgtcctatatttataccgcaacaacctgcagaggtacattgagatctacgtgcagaaggtcaaccctagccggaccccagctgtgattggagggctgcttgatgtggattgttctgaggaagtgattaaacacttaatcatggcagtgagaggacagttctctactgatgagttggtggctgaagtagaaaaaagaaataggctcaagctgctgcttccctggctggagtcccagattcaggaaggctgtgaggagcctgccactcacaatgcactggctaaaatctacatcgacagcaacaacagccccgagtgcttcctgagagagaatgcctactatgacagcagcgtggtgggccgctactgtgagaagcgagacccccatctggcctgtgttgcctatgagcgggggcagtgtgaccttgagctcatcaaggtgtgcaatgagaattctctgttcaaaagcgaggcccgctacctggtatgcagaaaggatccggagctctgggctcacgtccttgaggagaccaacccatccaggagacagctaattgaccaggtggtacagacagcattgtcagaaacacgggatcctgaagagatttcggtcactgtcaaagcctttatgacagccgacctgcctaatgaactgattgaactgctggagaagatagttctggataactctgtcttcagcgagcacaggaatctacagaatctgttgatcctgactgccatcaaggcagaccgcacacgggtcatggagtacatcagccgcctggacaactatgacgcactggacatcgcgagcatcgctgtcagcagcgcactgtatgaggaggccttcaccgttttccacaagtttgatatgaatgcctcagcaatccaggtcctgatcgagcacattggaaacctggaccgggcatatgagtttgcggagagatgcaatgagcctgctgtgtggagtcagctggcccaagcccagctccagaaagatttggtgaaggaagccatcaactcctatatcagaggggacgacccttcctcttacctggaagttgttcagtcagccagcaggagcaacaactgggaggatctagttaaatttctgcagatggccaggaaaaagggccgtgagtcctatatagagactgaacttatttttgccttggctaaaaccagccgtgtttctgagctagaagattttattaatggacccaacaatgcccacatccagcaggttggagaccgctgttacgaggagggaatgtacgaggctgccaagctgctctatagcaatgtttctaactttgcccgcctggcttccaccttggttcacctcggtgagtatcaggcagcagtggacaacagccgcaaggccagcagcacccggacgtggaaggaggtgtgctttgcctgcatggatggacaagagttccgcttcgcacagctgtgtggtcttcacatcgtcattcatgcagatgagctggaggagctgatgtgctattaccaggatcgtggctactttgaggagctgatcttgctgttggaagcggccctgggcctggagcgggcccacatgggcatgttcactgagctggccatcctctactccaaattcaagccacagaagatgctggagcatctggagcttttctggtcccgtgtcaacatcccaaaggtgctgagggctgcagagcaggcacacctgtgggctgagctggtgttcctctatgacaagtacgaggagtatgacaatgctgtgctcaccatgatgagccaccccactgaggcctggaaggagggtcagttcaaggacatcattaccaaggttgccaacgtcgagctctgttacagagccctgcagttctatttggattacaaaccactgctcatcaatgacctgctgctggtgctttcaccccggctggaccacacctggacagtcagtttcttttcaaaggcaggtcagctgcccctggtgaagccttacctgcggtcagtccagagccacaacaacaagagtgtgaatgaggcactcaaccacctgctgacagaggaggaggactatcagggcttaagggcatctatcgatgcctatgacaactttgacaacatcagcctggctcagcagctggagaagcatcagctgatggagttcaggtgcattgcggcctatctgtacaagggcaataactggtgggcccagagcgtggagctctgcaagaaggatcatctctacaaggatgccatgcagcatgctgcagagtcgcgggatgctgagctggcccagaagttgctgcagtggttcctggaggaaggcaagagggagtgcttcgcagcttgtctcttcacctgctatgacctgcttcgcccagacatggtgcttgagctggcctggaggcacaacctcgtggacttggccatgccctacttcatccaggtgatgagggagtacctgagcaaggtggacaaactggatgccttggagagtctgcgcaagcaagaggagcatgtgacagagcctgcccctctcgtgtttgattttgatgggcatgaatgagacccagctgattgcactaagccctgccgtgggcccagcccctgccagcttcccctatggatatgcctctgctcccaacttcgccagcctccaatgtacaacttccgcgtgtagtgggcgttgtcaccacccaccctacctgcagagttactaacttctccaaggagcatgtcactccagcagcacaggggacgcaatgggaggcagggacacctggacaatatttatttttgctgaaacccaatgacggcaacctctgagccatcccagagcctggggaggccagggtagaggctgacggcgcaagaccagctttagccgacaacagagactggactgtgggccctcctgctggagccaggccttcctcctgggcgcctccgactggctggagctgccccctccaggccagtttgaagactacatgaacacgtcttgtttggaggtaccggacctcataaaaggactctcagcctcttggcaatcataaatattaaagtcggtttatccaggcaaa

SEQ ID NO: 526 - DNA, 5313 bp, Homo sapiens
attcctgccgctgccgccgccgccgccgaggtcccgcaccagccatggcgcagatcctccctgttcgctttcaggagcacttccagctccaaaaccttggaattaatccagctaacattggattcagcacactgaccatggaatctgacaagttcatatgtatccgagagaaagttggtgagcaggcacaggtcacgatcattgacatgagtgacccaatggctccgatccgacggcctatctctgcagagagtgccatcatgaatccagcctctaaggtgatagctctgaaagctgggaagacacttcagatctttaatattgagatgaagagtaaaatgaaggctcatactatggcagaagaagtgattttctggaaatgggtttctgtgaacactgttgccttggtgaccgagaccgcggtctaccactggagcatggaaggtgactcccagcccatgaagatgtttgatagacataccagtctggtgggctgccaggtgattcactaccggactgatgagtaccagaagtggctgctgctcgtaggcatctcggctcagcaaaaccgtgtggttggagcaatgcagctctactctgtggataggaaggtttcacaacccatagaaggccatgctgcggcttttgcagagttcaagatggaggggaatgccaagcctgccacccttttctgctttgctgtacgtaatcccacaggaggcaagttgcacatcattgaagttggacagcctgcagcgggaaaccaaccttttgtaaagaaagcagtagatgtgttttttcctccagaggcacagaatgattttccagtggctatgcagattggagctaaacatggtgttatttacttgatcacaaagtatggctatcttcatctgtacgacctagagtctggcgtgtgcatctgcatgaaccgtattagtgctgacacaatatttgtcactgctccacacaaaccaacctctggaattattggtgtcaacaaaaagggacaggtactgtcagtttgtgttgaggaagataacattgtgaattatgcaaccaacgtgcttcagaatccagaccttggtctgcgtttggccgttcgtagtaacctggctggggcagagaagttgtttgtgagaaaattcaataccctctttgcacagggcagctatgctgaagccgccaaagttgcagcgtctgcaccaaagggaatcctgcgtaccagagagacggtccagaaattccagagtatacccgctcagtctggccaggcttctccattgctgcagtacttcggaatcctgctcgaccagggtcagctcaataaacttgaatccttagaactttgccatctggttcttcagcaggggcgtaagcaactcctagagaagtggctgaaagaagataagctggagtgctcagaggagctcggagacttggtcaaaaccactgaccccatgctcgctctgagtgtgtaccttcgggcaaatgtgccaagcaaagtgatccagtgttttgcagaaacaggccaattccagaaaattgtgctctatgccaaaaaggttgggtacaccccagactggatctttctgctgaggggtgtaatgaagatcagtccggaacagggcctgcagttttctcgaatgctagtgcaggacgaggagccgctggccaacattagccagattgtggacattttcatggaaaacagtttaattcagcagtgtacttccttcttattggatgccttgaagaataatcgcccagctgagggactcctgcagacatggctgttggagatgaaccttgttcatgcaccccaggttgcagatgccatccttggaaataaaatgtttactcattacgaccgggcccacattgcccagctctgtgagaaggcaggcctcctgcagcaagcactggagcactacaccgacctctatgacatcaagagggctgtggtccacactcacctcctcaatcccgagtggcttgtcaatttctttggctccttatcggtggaggattctgtggagtgtctgcatgccatgctgtctgctaacatcagacagaaccttcagctgtgtgtgcaggtggcctctaagtaccacgagcagctgggcacgcaggccctggtggagctctttgaatccttcaagagttacaaaggcctcttctacttcctgggctcaatcgtgaacttcagccaagacccagatgtgcatctgaaatacattcaggctgcctgtaagacagggcagatcaaggaggtggagaggatatgccgagagagcagctgctacaacccagagcgtgtgaagaacttcctgaaggaggccaagctcacagaccagcttcccctcatcatcgtgtgtgatcgttttggctttgtccatgaccttgtcctatatttataccgcaacaacctgcagaggtacattgagatctacgtgcagaaggtcaaccctagccggaccccagctgtgattggagggctgcttgatgtggattgttctgaggaagtgattaaacacttaatcatggcagtgagaggacagttctctactgatgagttggtggctgaagtagaaaaaagaaataggctcaagctgctgcttccctggctggagtcccagattcaggaaggctgtgaggagcctgccactcacaatgcactggctaaaatctacatcgacagcaacaacagccccgagtgcttcctgagagagaatgcctactatgacagcagcgtggtgggccgctactgtgagaagcgagacccccatctggcctgtgttgcctatgagcgggggcagtgtgaccttgagctcatcaaggtgtgcaatgagaattctctgttcaaaagcgaggcccgctacctggtatgcagaaaggatccggagctctgggctcacgtccttgaggagaccaacccatccaggagacagctaattgaccaggtggtacagacagcattgtcagaaacacgggatcctgaagagatttcggtcactgtcaaagcctttatgacagccgacctgcctaatgaactgattgaactgctggagaagatagttctggataactctgtcttcagcgagcacaggaatctacagaatctgttgatcctgactgccatcaaggcagaccgcacacgggtcatggagtacatcagccgcctggacaactatgacgcactggacatcgcgagcatcgctgtcagcagcgcactgtatgaggaggccttcaccgttttccacaagtttgatatgaatgcctcagcaatccaggtcctgatcgagcacattggaaacctggaccgggcatatgagtttgcggagagatgcaatgagcctgctgtgtggagtcagctggcccaagcccagctccagaaagatttggtgaaggaagccatcaactcctatatcagaggggacgacccttcctcttacctggaagttgttcagtcagccagcaggagcaacaactgggaggatctagttaaatttctgcagatggccaggaaaaagggccgtgagtcctatatagagactgaacttatttttgccttggctaaaaccagccgtgtttctgagctagaagattttattaatggacccaacaatgcccacatccagcaggttggagaccgctgttacgaggagggaatgtacgaggctgccaagctgctctatagcaatgtttctaactttgcccgcctggcttccaccttggttcacctcggtgagtatcaggcagcagtggacaacagccgcaaggccagcagcacccggacgtggaaggaggtgtgctttgcctgcatggatggacaagagttccgcttcgcacagctgtgtggtcttcacatcgtcattcatgcagatgagctggaggagctgatgtgctattaccaggatcgtggctactttgaggagctgatcttgctgttggaagcggccctgggcctggagcgggcccacatgggcatgttcactgagctggccatcctctactccaaattcaagccacagaagatgctggagcatctggagcttttctggtcccgtgtcaacatcccaaaggtgctgagggctgcagagcaggcacacctgtgggctgagctggtgttcctctatgacaagtacgaggagtatgacaatgctgtgctcaccatgatgagccaccccactgaggcctggaaggagggtcagttcaaggacatcattaccaaggttgccaacgtcgagctctgttacagagccctgcagttctatttggattacaaaccactgctcatcaatgacctgctgctggtgctttcaccccggctggaccacacctggacagtcagtttcttttcaaaggcaggtcagctgcccctggtgaagccttacctgcggtcagtccagagccacaacaacaagagtgtgaatgaggcactcaaccacctgctgacagaggaggaggactatcaggatgccatgcagcatgctgcagagtcgcgggatgctgagctggcccagaagttgctgcagtggttcctggaggaaggcaagagggagtgcttcgcagcttgtctcttcacctgctatgacctgcttcgcccagacatggtgcttgagctggcctggaggcacaacctcgtggacttggccatgccctacttcatccaggtgatgagggagtacctgagcaaggtggacaaactggatgccttggagagtctgcgcaagcaagaggagcatgtgacagagcctgcccctctcgtgtttgattttgatgggcatgaatgagacccagctgattgcactaagccctgccgtgggcccagcccctgccagcttcccctatggatatgcctctgctcccaacttcgccagcctccaatgtacaacttccgcgtgtagtgggcgttgtcaccacccaccctacctgcagagttactaacttctccaaggagcatgtcactccagcagcacaggggacgcaatgggaggcagggacacctggacaatatttatttttgctgaaacccaatgacggcaacctctgagccatcccagagcctggggaggccagggtagaggctgacggcgcaagaccagctttagccgacaacagagactggactgtgggccctcctgctggagccaggccttcctcctgggcgcctccgactggctggagctgccccctccaggccagtttgaagactacatgaacacgtcttgtttggaggtaccggacctcataaaaggactctcagcctcttggcaatcataaatattaaagtcggtttatccaggcaaa

SEQ ID NO: 527 - DNA, 7787 bp, Homo sapiens
cagccgtttccggagtctgcgctgcgcccggttccgccattgcggctctcctggcccctggagcctccgcccccgacccgagctctttcgtctgcctgccagtttcctgcgtccccggagaggatcctgctgagcccagcctcccccctccccttctcctcctctcccttggagagcccgggcagccactgccccgcagccccagtgacaggaggagaccataacccccgacagcgccatggcccagattctgccaattcgttttcaggagcatctccagctccagaacctgggtatcaacccagcaaacattggcttcagtaccctgactatggagtctgacaaattcatctgcattagagaaaaagtaggagagcaggcccaggtggtaatcattgatatgaatgacccaagtaatccaattcgaagaccaatttcagcagacagcgccatcatgaatccagctagcaaagtaattgcactgaaagctgggaaaactcttcagatttttaacattgaaatgaaaagtaaaatgaaggctcataccatgactgatgatgtcaccttttggaaatggatctctttgaatacggttgctcttgttacggataatgcagtttatcactggagtatggaaggagagtctcagccagtgaaaatgtttgatcgccattctagccttgcagggtgccagattatcaattaccgtacagatgcaaaacaaaagtggttacttctgactggtatatctgcacagcaaaatcgtgtggtgggagctatgcagctatattctgtagataggaaagtgtctcagcccattgaaggacatgcagctagctttgcacagtttaagatggaaggaaatgcagaagaatcaacgttattttgttttgcagttcggggccaagctggagggaagttacatattattgaagttggcacaccacctacagggaaccagccctttccaaagaaggcagtggatgtcttctttcctccagaagcacaaaatgattttcctgttgcaatgcagatcagtgaaaagcatgatgtggtgttcttgataaccaagtatggttatatccacctctatgatcttgagactggtacctgcatctacatgaatagaatcagtggagaaacaatttttgttactgcacctcatgaagccacagctggaataattggagtaaacagaaagggacaagttctgtcagtgtgtgtggaagaagaaaacataattccttacatcaccaatgttctacaaaatcctgatttggctctgagaatggctgtacgtaataacttagccggtgctgaagaactctttgcccggaaatttaatgctctttttgcccagggaaattactcggaggcagcaaaggtggctgctaatgcaccaaagggaattcttcgtactccagacactatccgtcggttccagagtgtcccagcccagccaggtcaaacttctcctctacttcagtactttggtatccttttggaccagggacagctcaacaaatacgaatccttagagctttgtaggcctgtacttcagcaagggcgaaaacagcttttggagaaatggttaaaagaagataagctggaatgttctgaagaactgggtgatcttgtgaaatctgtggaccctacattggcacttagtgtgtacctaagggctaacgtcccaaataaagtcattcagtgctttgcagaaacaggtcaagtccaaaagattgttttatatgctaaaaaagttggatacactccagattggatatttctgctgagaaatgtaatgcgaatcagtccagatcagggacagcagtttgcccaaatgttagttcaagatgaagagcctcttgctgacatcacacagattgtagatgtctttatggaatacaatctaattcagcagtgtactgcattcttgcttgatgctctgaagaataatcgcccatctgaaggtcctttacagacgcggttacttgagatgaaccttatgcatgcgcctcaagttgcagatgctattctaggcaatcagatgttcacacattatgaccgggctcatattgctcaactgtgtgaaaaggctggcctactgcagcgtgcattagaacatttcactgatttatatgatataaaacgtgcagtggttcacacccatcttcttaaccctgagtggttagtcaactactttggttccttatcagtagaagactccctagaatgtctcagagccatgctgtctgccaacatccgtcagaatctgcagatttgtgttcaggtggcttctaaatatcatgaacaactgtcaactcagtctctgattgaactttttgaatctttcaagagttttgaaggtctcttttattttctgggatccattgttaactttagccaggacccagatgtgcactttaaatatattcaggcagcttgcaagactgggcaaatcaaagaagtagaaagaatctgtagagaaagcaactgctacgatcctgagcgagtcaagaattttcttaaggaagcaaaactaacagatcagctaccacttatcattgtgtgtgatcgatttgactttgtccatgatttggtgctctatttatatagaaataatcttcaaaagtatatagagatatatgtacagaaggtgaatccaagtcgacttcctgtagttattggaggattacttgatgttgactgttctgaagatgtcataaaaaacttgattcttgttgtaagaggtcaattctctactgatgagcttgttgctgaggttgaaaaaagaaacagattgaaactgcttctgccttggctagaggccagaattcatgagggctgtgaggagcctgctactcacaatgccttagccaaaatctacatagacagtaataacaacccggagagatttcttcgtgaaaatccctactatgacagtcgcgttgttggaaagtattgtgagaagagagatccacatctggcctgtgttgcttatgaacgtggccaatgtgatctggaacttattaatgtttgcaatgagaattccctcttcaaaagtctttctcgctacctggtacgtcgaaaggatccagaattgtggggcagcgtgctgctggaaagcaatccttacaggagacccctaattgaccaggttgtacaaacagctttgtctgagactcaggaccctgaagaagtgtcagtaactgtaaaggctttcatgactgcagaccttcctaatgaactcattgaactgctggagaaaattgtccttgataactctgtattcagtgaacacaggaatctgcaaaacctccttatcctcactgcaattaaggctgaccgtacacgtgttatggagtatattaaccgcctggataattatgatgccccagatattgccaatatcgccatcagcaatgagctgtttgaagaagcatttgccattttccggaaatttgatgtcaatacttcagcagttcaggtcttaattgagcatattggaaacttggatcgggcatatgagtttgctgaacgttgcaatgaacctgcggtctggagtcaacttgcaaaagcccagttgcagaaaggaatggtgaaagaagccattgattcttatatcaaagcagatgatccttcctcctacatggaagttgttcaggctgccaatactagtggaaactgggaagaactggtgaagtacttgcagatggcccgtaagaaggctcgagagtcctatgtggagacagaactgatattcgcactggctaaaacaaaccgccttgcagagttagaagaatttatcaatggaccaaataatgctcatatccaacaagttggtgaccgttgttatgatgaaaaaatgtatgatgctgctaagttgttgtacaataatgtttccaattttggacgtttggcatctaccctggttcacctgggtgaatatcaggcagctgttgatggggctaggaaagctaacagtactcgaacatggaaagaggtctgcttcgcctgtgtagatgggaaagaattccgtcttgctcagatgtgtggacttcatattgttgtacatgcagatgaattagaagaacttatcaactactatcaggatcgtggctattttgaagagctgatcaccatgttggaagcagcactgggacttgagcgagctcacatgggaatgtttactgaattagctattctatactctaaatttaagcctcagaaaatgagggagcacctggagctgttctggtctagagtgaatattcccaaggtgctaagagctgcagaacaagctcatctttgggcagaactggtgtttttgtatgacaagtatgaagaatatgataatgccataattaccatgatgaatcatccaactgatgcctggaaagaagggcaattcaaagatatcattaccaaggttgccaatgtggaactatactacagagcaatacagttctacttagaattcaagcctctgttgttaaatgatttgctgatggtgctgtctccacggttggatcacactcgtgcagtcaattatttcagcaaggttaaacagctaccactggtgaaaccgtatttgcgttcagttcagaaccataacaacaaatctgtgaatgaatcattgaacaatctttttattacagaagaagattatcaggctctgcgaacatcaatagatgcttatgacaactttgacaatatctcgcttgctcagcgtttggaaaaacatgaactcattgagttcaggagaattgctgcttatctcttcaaaggcaacaatcgctggaaacagagtgtagagctgtgcaagaaagacagcctttacaaggatgcaatgcagtatgcttctgaatctaaagatactgaattggctgaagaactcctgcagtggtttttgcaggaagaaaaaagagagtgctttggagcttgtctgtttacctgttacgatcttttaaggccagatgtcgtcctagaaactgcatggaggcacaatatcatggattttgccatgccctatttcatccaggtcatgaaggagtacttgacaaaggtggataaattagatgcttcagaatcactgagaaaagaagaagaacaagctacagagacacaacccattgtttatggtcagccccagttgatgctgacagcaggacccagtgttgccgtccctccccaggcaccttttggttatggttataccgcaccaccgtatggacagccacagcctggctttgggtacagcatgtgagatgaagcgctgatcctgtagtcacctattttcgtactgaaacatcgtctttacccacttctcagtttataatgggggaaaacaggcaacgtgttcttgtaacctttatttcatgaaggacttctttttgtttctaactataaacttggatcacctatgttaaaaccttatttcacattccacatcattttagaatttattttcgaaggggaatagtttcaatgttttattcacttgggctttttttcttccccctctttctttaaagaactgctcaatattcaatctgttgtgaagaacctgatttgcactctgtagtgtttaaagaaacaaagaaactctaatattgaatctcttaaatttagtgtatgtaaacagcttacaaatacgtattgtctaaatgcatttaaatctgttttattcaaagaaaagctaaagcaaaaacactggcatatgaccatgcaagactgtcagtgccaacaaagacaacactaatcagcacatcgtacactggattgcagtgcttcccagattattgaaaaatgttacagacaacttgcctgatttttaaatgagcgtaaaaggccctctaacctatgcaggtttccccattatgcatatagaaaatgctagtatgttttgctcacttcatatgtaacaggtgcccttatgttgtgctgtatcctgtgctttttctgtgggaccattccattcaggagcaaagagcaccatgattccaatcttgtgtgtgtttactaacccttccctgaggtttgtgtatgttggatattgtggtgttttagatcactgagtgtacagaagagagaaattcaaacaaaatattgctgttcttcagttttgtttgtggaatttgaaattactcaaatttaaaataaattactggactgtggaaataacatagaattgaagttttaattaaataccactcaaacgaaaagaacagtagtttttgtagttttatattggatactgaggcattagggaggcatgaaaggaagaggaatgaggattgagacatgtgaagacattgtgcattatatcaatgtgcattcctgtagttcattaacaaggtacatgcaatagtctaaagaaccagagtcactactatagtggcttaacatttaatctgtctccaatattttaaccaagtgacaccgaggtttttatcgaagcatttcacttaaatgaacaaatcatggctgttatattaacttgaaataaaatatatttaaacatgtagttaacatgctctttctcatcatgaattataaaggtgcccaaattatgggtatcttgatttttttcaaaaattggttgtgtgaatccagctcttgcttatggctgagaatgttcctaaagttcatttcactatcccttaatcctcaatagctacacatacccccttgcctagttagtcttgcactgctttacaactctcttaggcaaattacctaacataagctccacagaagagttttttaaaacttaaaatccctgtcccaccaggtgtggtggctcatgcctgtaatcccagcactttgggaggctgaggcaggcggattgcttgaggccaggagttcgagacaagcctgaccaacatggtgactccatctctactaaaaataaaaaatcagccaggtgtgatggtggatgcctataagatcctagctgctactcaggaggcaggaggctgaggcatgagaatcacttgaacctgtgaggcaaaggttgtagtgagccaagatcacgtcactgcactccatcctgggtgacagaatgagactcttgtctcaaaaaacaaaaaaacctatttagtttcatccaggacattaagtgaaagtgtttaatgtgagtgcaggtcagtgaagaatacaatggtgcccctgctttgatttgtgggaggtgccatcagttttccccaccactgcttttgcaccctcagtgcaaatatcaacacagagaaaaaaaaaaataatagtattatgaaaacattgactctgtggagaccctgtgggttctgcagagtatactttgaaaactataagattatgagttctataaaataccaagtacagatgaactagaaaacaagcatatatccacaattaccagaattttcatagtattccttttagtagatatgccatgacagttacttagccaccccatgccatcctgttgggaatgccactacctttgaatttggagccatcagtctatctgaggcaaacctcagaaattacctgagccagaatcatgcacttagcactgagttcaactcagtcttaacgttgcattttgttgcatcacttttgcagccagtaaacattctgtttagaaatagttgctattgtggcatcattcacagttgcaatttttctcctgtgctgtcatatgcctgtgcgaagtgtattaaatgaatcaaatattagaaatttcaaggctgtctttagtgttctgcccacaatactccaccaatgaccttagaccttgagatggt

SEQ ID NO: 528 - DNA, 6400 bp, Homo sapiens
cagccgtttccggagtctgcgctgcgcccggttccgccattgcggctctcctggcccctggagcctccgcccccgacccgagctctttcgtctgcctgccagtttcctgcgtccccggagaggatcctgctgagcccagcctcccccctccccttctcctcctctcccttggagagcccgggcagccactgccccgcagccccagtgacaggaggagaccataacccccgacagcgccatggcccagattctgccaattcgttttcaggagcatctccagctccagaacctgggtatcaacccagcaaacattggcttcagtaccctgactatggagtctgacaaattcatctgcattagagaaaaagtaggagagcaggcccaggtggtaatcattgatatgaatgacccaagtaatccaattcgaagaccaatttcagcagacagcgccatcatgaatccagctagcaaagtaattgcactgaaagctgggaaaactcttcagatttttaacattgaaatgaaaagtaaaatgaaggctcataccatgactgatgatgtcaccttttggaaatggatctctttgaatacggttgctcttgttacggataatgcagtttatcactggagtatggaaggagagtctcagccagtgaaaatgtttgatcgccattctagccttgcagggtgccagattatcaattaccgtacagatgcaaaacaaaagtggttacttctgactggtatatctgcacagcaaaatcgtgtggtgggagctatgcagctatattctgtagataggaaagtgtctcagcccattgaaggacatgcagctagctttgcacagtttaagatggaaggaaatgcagaagaatcaacgttattttgttttgcagttcggggccaagctggagggaagttacatattattgaagttggcacaccacctacagggaaccagccctttccaaagaaggcagtggatgtcttctttcctccagaagcacaaaatgattttcctgttgcaatgcagatcagtgaaaagcatgatgtggtgttcttgataaccaagtatggttatatccacctctatgatcttgagactggtacctgcatctacatgaatagaatcagtggagaaacaatttttgttactgcacctcatgaagccacagctggaataattggagtaaacagaaagggacaagttctgtcagtgtgtgtggaagaagaaaacataattccttacatcaccaatgttctacaaaatcctgatttggctctgagaatggctgtacgtaataacttagccggtgctgaagaactctttgcccggaaatttaatgctctttttgcccagggaaattactcggaggcagcaaaggtggctgctaatgcaccaaagggaattcttcgtactccagacactatccgtcggttccagagtgtcccagcccagccaggtcaaacttctcctctacttcagtactttggtatccttttggaccagggacagctcaacaaatacgaatccttagagctttgtaggcctgtacttcagcaagggcgaaaacagcttttggagaaatggttaaaagaagataagctggaatgttctgaagaactgggtgatcttgtgaaatctgtggaccctacattggcacttagtgtgtacctaagggctaacgtcccaaataaagtcattcagtgctttgcagaaacaggtcaagtccaaaagattgttttatatgctaaaaaagttggatacactccagattggatatttctgctgagaaatgtaatgcgaatcagtccagatcagggacagcagtttgcccaaatgttagttcaagatgaagagcctcttgctgacatcacacagattgtagatgtctttatggaatacaatctaattcagcagtgtactgcattcttgcttgatgctctgaagaataatcgcccatctgaaggtcctttacagacgcggttacttgagatgaaccttatgcatgcgcctcaagttgcagatgctattctaggcaatcagatgttcacacattatgaccgggctcatattgctcaactgtgtgaaaaggctggcctactgcagcgtgcattagaacatttcactgatttatatgatataaaacgtgcagtggttcacacccatcttcttaaccctgagtggttagtcaactactttggttccttatcagtagaagactccctagaatgtctcagagccatgctgtctgccaacatccgtcagaatctgcagatttgtgttcaggtggcttctaaatatcatgaacaactgtcaactcagtctctgattgaactttttgaatctttcaagagttttgaaggtctcttttattttctgggatccattgttaactttagccaggacccagatgtgcactttaaatatattcaggcagcttgcaagactgggcaaatcaaagaagtagaaagaatctgtagagaaagcaactgctacgatcctgagcgagtcaagaattttcttaaggaagcaaaactaacagatcagctaccacttatcattgtgtgtgatcgatttgactttgtccatgatttggtgctctatttatatagaaataatcttcaaaagtatatagagatatatgtacagaaggtgaatccaagtcgacttcctgtagttattggaggattacttgatgttgactgttctgaagatgtcataaaaaacttgattcttgttgtaagaggtcaattctctactgatgagcttgttgctgaggttgaaaaaagaaacagattgaaactgcttctgccttggctagaggccagaattcatgagggctgtgaggagcctgctactcacaatgccttagccaaaatctacatagacagtaataacaacccggagagatttcttcgtgaaaatccctactatgacagtcgcgttgttggaaagtattgtgagaagagagatccacatctggcctgtgttgcttatgaacgtggccaatgtgatctggaacttattaatgtttgcaatgagaattccctcttcaaaagtctttctcgctacctggtacgtcgaaaggatccagaattgtggggcagcgtgctgctggaaagcaatccttacaggagacccctaattgaccaggttgtacaaacagctttgtctgagactcaggaccctgaagaagtgtcagtaactgtaaaggctttcatgactgcagaccttcctaatgaactcattgaactgctggagaaaattgtccttgataactctgtattcagtgaacacaggaatctgcaaaacctccttatcctcactgcaattaaggctgaccgtacacgtgttatggagtatattaaccgcctggataattatgatgccccagatattgccaatatcgccatcagcaatgagctgtttgaagaagcatttgccattttccggaaatttgatgtcaatacttcagcagttcaggtcttaattgagcatattggaaacttggatcgggcatatgagtttgctgaacgttgcaatgaacctgcggtctggagtcaacttgcaaaagcccagttgcagaaaggaatggtgaaagaagccattgattcttatatcaaagcagatgatccttcctcctacatggaagttgttcaggctgccaatactagtggaaactgggaagaactggtgaagtacttgcagatggcccgtaagaaggctcgagagtcctatgtggagacagaactgatattcgcactggctaaaacaaaccgccttgcagagttagaagaatttatcaatggaccaaataatgctcatatccaacaagttggtgaccgttgttatgatgaaaaaatgtatgatgctgctaagttgttgtacaataatgtttccaattttggacgtttggcatctaccctggttcacctgggtgaatatcaggcagctgttgatggggctaggaaagctaacagtactcgaacatggaaagaggtctgcttcgcctgtgtagatgggaaagaattccgtcttgctcagatgtgtggacttcatattgttgtacatgcagatgaattagaagaacttatcaactactatcaggatcgtggctattttgaagagctgatcaccatgttggaagcagcactgggacttgagcgagctcacatgggaatgtttactgaattagctattctatactctaaatttaagcctcagaaaatgagggagcacctggagctgttctggtctagagtgaatattcccaaggtgctaagagctgcagaacaagctcatctttgggcagaactggtgtttttgtatgacaagtatgaagaatatgataatgccataattaccatgatgaatcatccaactgatgcctggaaagaagggcaattcaaagatatcattaccaaggttgccaatgtggaactatactacagagcaatacagttctacttagaattcaagcctctgttgttaaatgatttgctgatggtgctgtctccacggttggatcacactcgtgcagtcaattatttcagcaaggttaaacagctaccactggtgaaaccgtatttgcgttcagttcagaaccataacaacaaatctgtgaatgaatcattgaacaatctttttattacagaagaagattatcaggctctgcgaacatcaatagatgcttatgacaactttgacaatatctcgcttgctcagcgtttggaaaaacatgaactcattgagttcaggagaattgctgcttatctcttcaaaggcaacaatcgctggaaacagagtgtagagctgtgcaagaaagacagcctttacaaggatgcaatgcagtatgcttctgaatctaaagatactgaattggctgaagaactcctgcagtggtttttgcaggaagaaaaaagagagtgctttggagcttgtctgtttacctgttacgatcttttaaggccagatgtcgtcctagaaactgcatggaggcacaatatcatggattttgccatgccctatttcatccaggtcatgaaggagtacttgacaaaggtggataaattagatgcttcagaatcactgagaaaagaagaagaacaagctacagagacacaacccattgtttatggtcagccccagttgatgctgacagcaggacccagtgttgccgtccctccccaggcaccttttggttatggttataccgcaccaccgtatggacagccacagcctggctttgggtacagcatgtgagatgaagcgctgatcctgtagtcacctattttcgtactgaaacatcgtctttacccacttctcagtttataatgggggaaaacaggcaacgtgttcttgtaacctttatttcatgaaggacttctttttgtttctaactataaacttggatcacctatgttaaaaccttatttcacattccacatcattttagaatttattttcgaaggggaatagtttcaatgttttattcacttgggctttttttcttccccctctttctttaaagaactgctcaatattcaatctgttgtgaagaacctgatttgcactctgtagtgtttaaagaaacaaagaaactctaatattgaatctcttaaatttagtgtatgtaaacagcttacaaatacgtattgtctaaatgcatttaaatctgttttattcaaagaaaagctaaagcaaaaacactggcatatgaccatgcaagactgtcagtgccaacaaagacaacactaatcagcacatcgtacactggattgcagtgcttcccagattattgaaaaatgttacagacaacttgcctgatttttaaatgagcgtaaaaggccctctaacctatgcaggtttccccattatgcatatagaaaatgctagtatgttttgctcacttcatatgtaacaggtgcccttatgttgtgctgtatcctgtgctttttctgtgggaccattccattcaggagcaaagagcaccatgattccaatcttgtgtgtgtttactaacccttccctgaggtttgtgtatgttggatattgtggtgttttagatcactgagtgtacagaagagagaaattcaaacaaaatattgctgttcttcagttttgtttgtggaatttgaaattactcaaatttaaaataaattactggactgtggaaataacatagaattgaagttttaattaaataccactcaaacgcatgaaaggaagaggaatgaggattgagacatgtgaagacattgtgcattatatcaatgtgcattcctgtagttcattaacaaggtacatgcaatagtctaaagaaccagagtcactactatagtggcttaacatttaatctgtctccaatattttaaccaagtgacaccgaggttttta

SEQ ID NO: 529 - DNA, 6421 bp, Homo sapiens
cagccgtttccggagtctgcgctgcgcccggttccgccattgcggctctcctggcccctggagcctccgcccccgacccgagctctttcgtctgcctgccagtttcctgcgtccccggagaggatcctgctgagcccagcctcccccctccccttctcctcctctcccttggagagcccgggcagccactgccccgcagccccagtgacaggaggagaccataacccccgacagcgccatggcccagattctgccaattcgttttcaggagcatctccagctccagaacctgggtatcaacccagcaaacattggcttcagtaccctgactatggagtctgacaaattcatctgcattagagaaaaagtaggagagcaggcccaggtggtaatcattgatatgaatgacccaagtaatccaattcgaagaccaatttcagcagacagcgccatcatgaatccagctagcaaagtaattgcactgaaagctgggaaaactcttcagatttttaacattgaaatgaaaagtaaaatgaaggctcataccatgactgatgatgtcaccttttggaaatggatctctttgaatacggttgctcttgttacggataatgcagtttatcactggagtatggaaggagagtctcagccagtgaaaatgtttgatcgccattctagccttgcagggtgccagattatcaattaccgtacagatgcaaaacaaaagtggttacttctgactggtatatctgcacagcaaaatcgtgtggtgggagctatgcagctatattctgtagataggaaagtgtctcagcccattgaaggacatgcagctagctttgcacagtttaagatggaaggaaatgcagaagaatcaacgttattttgttttgcagttcggggccaagctggagggaagttacatattattgaagttggcacaccacctacagggaaccagccctttccaaagaaggcagtggatgtcttctttcctccagaagcacaaaatgattttcctgttgcaatgcagatcagtgaaaagcatgatgtggtgttcttgataaccaagtatggttatatccacctctatgatcttgagactggtacctgcatctacatgaatagaatcagtggagaaacaatttttgttactgcacctcatgaagccacagctggaataattggagtaaacagaaagggacaagttctgtcagtgtgtgtggaagaagaaaacataattccttacatcaccaatgttctacaaaatcctgatttggctctgagaatggctgtacgtaataacttagccggtgctgaagaactctttgcccggaaatttaatgctctttttgcccagggaaattactcggaggcagcaaaggtggctgctaatgcaccaaagggaattcttcgtactccagacactatccgtcggttccagagtgtcccagcccagccaggtcaaacttctcctctacttcagtactttggtatccttttggaccagggacagctcaacaaatacgaatccttagagctttgtaggcctgtacttcagcaagggcgaaaacagcttttggagaaatggttaaaagaagataagctggaatgttctgaagaactgggtgatcttgtgaaatctgtggaccctacattggcacttagtgtgtacctaagggctaacgtcccaaataaagtcattcagtgctttgcagaaacaggtcaagtccaaaagattgttttatatgctaaaaaagttggatacactccagattggatatttctgctgagaaatgtaatgcgaatcagtccagatcagggacagcagtttgcccaaatgttagttcaagatgaagagcctcttgctgacatcacacagattgtagatgtctttatggaatacaatctaattcagcagtgtactgcattcttgcttgatgctctgaagaataatcgcccatctgaaggtcctttacagacgcggttacttgagatgaaccttatgcatgcgcctcaagttgcagatgctattctaggcaatcagatgttcacacattatgaccgggctcatattgctcaactgtgtgaaaaggctggcctactgcagcgtgcattagaacatttcactgatttatatgatataaaacgtgcagtggttcacacccatcttcttaaccctgagtggttagtcaactactttggttccttatcagtagaagactccctagaatgtctcagagccatgctgtctgccaacatccgtcagaatctgcagatttgtgttcaggtggcttctaaatatcatgaacaactgtcaactcagtctctgattgaactttttgaatctttcaagagttttgaaggtctcttttattttctgggatccattgttaactttagccaggacccagatgtgcactttaaatatattcaggcagcttgcaagactgggcaaatcaaagaagtagaaagaatctgtagagaaagcaactgctacgatcctgagcgagtcaagaattttcttaaggaagcaaaactaacagatcagctaccacttatcattgtgtgtgatcgatttgactttgtccatgatttggtgctctatttatatagaaataatcttcaaaagtatatagagatatatgtacagaaggtgaatccaagtcgacttcctgtagttattggaggattacttgatgttgactgttctgaagatgtcataaaaaacttgattcttgttgtaagaggtcaattctctactgatgagcttgttgctgaggttgaaaaaagaaacagattgaaactgcttctgccttggctagaggccagaattcatgagggctgtgaggagcctgctactcacaatgccttagccaaaatctacatagacagtaataacaacccggagagatttcttcgtgaaaatccctactatgacagtcgcgttgttggaaagtattgtgagaagagagatccacatctggcctgtgttgcttatgaacgtggccaatgtgatctggaacttattaatgtttgcaatgagaattccctcttcaaaagtctttctcgctacctggtacgtcgaaaggatccagaattgtggggcagcgtgctgctggaaagcaatccttacaggagacccctaattgaccaggttgtacaaacagctttgtctgagactcaggaccctgaagaagtgtcagtaactgtaaaggctttcatgactgcagaccttcctaatgaactcattgaactgctggagaaaattgtccttgataactctgtattcagtgaacacaggaatctgcaaaacctccttatcctcactgcaattaaggctgaccgtacacgtgttatggagtatattaaccgcctggataattatgatgccccagatattgccaatatcgccatcagcaatgagctgtttgaagaagcatttgccattttccggaaatttgatgtcaatacttcagcagttcaggtcttaattgagcatattggaaacttggatcgggcatatgagtttgctgaacgttgcaatgaacctgcggtctggagtcaacttgcaaaagcccagttgcagaaaggaatggtgaaagaagccattgattcttatatcaaagcagatgatccttcctcctacatggaagttgttcaggctgccaatactagtggaaactgggaagaactggtgaagtacttgcagatggcccgtaagaaggctcgagagtcctatgtggagacagaactgatattcgcactggctaaaacaaaccgccttgcagagttagaagaatttatcaatggaccaaataatgctcatatccaacaagttggtgaccgttgttatgatgaaaaaatgtatgatgctgctaagttgttgtacaataatgtttccaattttggacgtttggcatctaccctggttcacctgggtgaatatcaggcagctgttgatggggctaggaaagctaacagtactcgaacatggaaagaggtctgcttcgcctgtgtagatgggaaagaattccgtcttgctcagatgtgtggacttcatattgttgtacatgcagatgaattagaagaacttatcaactactatcaggatcgtggctattttgaagagctgatcaccatgttggaagcagcactgggacttgagcgagctcacatgggaatgtttactgaattagctattctatactctaaatttaagcctcagaaaatgagggagcacctggagctgttctggtctagagtgaatattcccaaggtgctaagagctgcagaacaagctcatctttgggcagaactggtgtttttgtatgacaagtatgaagaatatgataatgccataattaccatgatgaatcatccaactgatgcctggaaagaagggcaattcaaagatatcattaccaaggttgccaatgtggaactatactacagagcaatacagttctacttagaattcaagcctctgttgttaaatgatttgctgatggtgctgtctccacggttggatcacactcgtgcagtcaattatttcagcaaggttaaacagctaccactggtgaaaccgtatttgcgttcagttcagaaccataacaacaaatctgtgaatgaatcattgaacaatctttttattacagaagaagattatcaggctctgcgaacatcaatagatgcttatgacaactttgacaatatctcgcttgctcagcgtttggaaaaacatgaactcattgagttcaggagaattgctgcttatctcttcaaaggcaacaatcgctggaaacagagtgtagagctgtgcaagaaagacagcctttacaaggatgcaatgcagtatgcttctgaatctaaagatactgaattggctgaagaactcctgcagtggtttttgcaggaagaaaaaagagagtgctttggagcttgtctgtttacctgttacgatcttttaaggccagatgtcgtcctagaaactgcatggaggcacaatatcatggattttgccatgccctatttcatccaggtcatgaaggagtacttgacaaaggttgatgcaataaaggaaaaggtggataaattagatgcttcagaatcactgagaaaagaagaagaacaagctacagagacacaacccattgtttatggtcagccccagttgatgctgacagcaggacccagtgttgccgtccctccccaggcaccttttggttatggttataccgcaccaccgtatggacagccacagcctggctttgggtacagcatgtgagatgaagcgctgatcctgtagtcacctattttcgtactgaaacatcgtctttacccacttctcagtttataatgggggaaaacaggcaacgtgttcttgtaacctttatttcatgaaggacttctttttgtttctaactataaacttggatcacctatgttaaaaccttatttcacattccacatcattttagaatttattttcgaaggggaatagtttcaatgttttattcacttgggctttttttcttccccctctttctttaaagaactgctcaatattcaatctgttgtgaagaacctgatttgcactctgtagtgtttaaagaaacaaagaaactctaatattgaatctcttaaatttagtgtatgtaaacagcttacaaatacgtattgtctaaatgcatttaaatctgttttattcaaagaaaagctaaagcaaaaacactggcatatgaccatgcaagactgtcagtgccaacaaagacaacactaatcagcacatcgtacactggattgcagtgcttcccagattattgaaaaatgttacagacaacttgcctgatttttaaatgagcgtaaaaggccctctaacctatgcaggtttccccattatgcatatagaaaatgctagtatgttttgctcacttcatatgtaacaggtgcccttatgttgtgctgtatcctgtgctttttctgtgggaccattccattcaggagcaaagagcaccatgattccaatcttgtgtgtgtttactaacccttccctgaggtttgtgtatgttggatattgtggtgttttagatcactgagtgtacagaagagagaaattcaaacaaaatattgctgttcttcagttttgtttgtggaatttgaaattactcaaatttaaaataaattactggactgtggaaataacatagaattgaagttttaattaaataccactcaaacgcatgaaaggaagaggaatgaggattgagacatgtgaagacattgtgcattatatcaatgtgcattcctgtagttcattaacaaggtacatgcaatagtctaaagaaccagagtcactactatagtggcttaacatttaatctgtctccaatattttaaccaagtgacaccgaggttttta

SEQ ID NO: 530 - DNA, 14760 bp, Homo sapiens
ccaggaggccatgtcgggtgaggacgctgaggtccgggcagtctctgaagatgtctccaatggaagcagtggctcgcccagccctggggacacactgccctggaaccttgggaaaacgcagcggagccggcgcagcgggggtggcgctgggagcaacgggagtgtcctggacccagctgagcgggcggtcattcgcatcgcagatgagcgggatcgtgtgcagaagaaaaccttcaccaagtgggtcaacaagcacctcatcaaggcccagaggcacatcagtgacctgtatgaagacctccgcgatggccacaacctcatctccctgctggaggtcctctcgggggacagcctgccccgggagaaggggaggatgcgtttccacaagctgcagaatgtccagattgccctggactacctccggcaccgccaggtgaagctggtgaacatcaggaatgatgacatcgctgacggcaaccccaagctgacccttggcctcatctggacaatcattctgcacttccagatctcagatatccaggtgagtgggcagtcggaggacatgacggccaaggagaagctgctgctgtggtcgcagcgaatggtggaggggtaccagggcctgcgatgcgacaacttcacctccagctggagagacggccgcctcttcaatgccatcatccaccggcacaagcccctgctcatcgacatgaacaaggtgtaccggcagaccaacctggagaacctggaccaggccttctctgtggcggagcgggacctgggagtgacgcggctcctggaccctgaggacgtggatgtccctcagcccgacgagaagtccatcatcacctacgtctcgtcgctgtatgacgccatgccccgcgtgccggacgtgcaggatggggtgagggccaacgagctgcagctgcgctggcaggagtaccgggagctggtgctgctgctgcttcagtggatgcgacaccacacggccgcctttgaggaacgcaggttcccctccagcttcgaggagattgagatcctgtggtctcagttcctgaagtttaaggagatggagctaccagccaaggaggccgacaagaacaggtccaagggcatctaccaatccctggagggagcggtgcaagcaggccagctcaaggtgccccctggctaccacccgctggatgtggagaaggagtggggcaagctgcacgtggccatcctggagcgggagaagcagctccgcagcgagtttgagaggctggagtgtcttcagcgcatcgtgaccaagctgcagatggaggcggggctgtgtgaggagcagctgaaccaggccgacgccctgctgcagtcggatgtccggctgctggctgcaggcaaagtgccacagcgggcgggggaggtggaacgggacttggacaaggcggatagcatgatccggctgctcttcaacgacgtgcagaccctcaaggatggacggcacccgcagggcgagcagatgtaccgcagggtgtaccgtctgcacgagcgcctggtagccatccgcaccgagtacaacctacggctgaaggcaggcgtggcggcccctgcaacccaggtggtccaggtgactctgcagagtgtgcagaggcgccccgagctggaggactccactctgcgctacctgcaggacctgctggcctgggtggaggagaaccagcaccgtgtggatggcgctgagtggggtgtggacctgcccagcgtggaggcgcagctgggcagccaccgaggcctgcaccagtccatcgaagaattccgggccaagatcgagcgggcacggagtgacgagggccagctctcccccgccacccggggtgcctaccgtgactgcctgggtcggctggacctgcagtacgccaagctgctgaactcctccaaggcccgcctcaggtccctggagagcttgcacagctttgtggcagccgccactaaggagctaatgtggctgaatgagaaggaggaggaggaggtgggcttcgactggagcgaccgcaacaccaacatgaccgccaagaaggagagctactcggcgctgatgcgggagctggagctgaaggagaagaagatcaaggagctccaaaatgctggggaccggctgctgcgggaggaccacccggcccggcccacggtggagtccttccaggcggccctgcagacgcagtggagctggatgctacagctgtgctgctgtatcgaggcacacctgaaggagaacgctgcctactttcagttcttctcagatgtgcgggaggccgaggggcagttgcagaagctgcaggaggcactgcgtaggaaatacagttgtgatcgctccgccaccgtcacccggctggaggacctgctgcaggatgcccaggacgagaaggaacagctgaacgagtacaagggccacctctcaggcctggccaagcgggccaaggccgtcgtgcagctgaagccccgccacccagcccaccccatgcggggccgcctgcccctgctggccgtgtgcgactataagcaggtggaggtgactgtgcacaagggtgacgagtgccagctggtgggccctgcacagccgtcccactggaaggtgctcagcagctccggcagcgaggccgccgtgccctccgtgtgcttcctggtgcccccgcccaaccaggaggcccaggaggccgtcaccaggctggaggcccagcaccaggccctggtcacgctgtggcaccagttgcacgtggacatgaagagccttctggcctggcagagccttcgccgcgacgtgcagctcatccgctcctggtccctggccacgttccgcaccctgaagccagaggagcagcgccaagccctgcacagcctggagctgcactaccaggccttcctgcgggacagccaggacgcgggcggcttcggacccgaggaccggctgatggctgagcgcgagtacggctcctgcagccaccactaccagcagctgctgcagagcctggaacagggtgcacaggaagagtctcgctgccagcgctgcatctccgagctcaaagacatccggctgcagctggaggcctgtgagacgcgcaccgtgcaccgcctgcggctgccgctggacaaagagccggcacgggagtgtgcccagcgcatcgccgagcagcagaaggcacaggcagaggtggaggggctgggcaagggggtcgcccggctctctgccgaggccgagaaggtcttggccctaccagagccatcgcctgcggcccccacgctgcgctcggagctggagctgacgctgggcaagctggagcaggtccgcagcctgtctgccatctacctggagaagctcaagaccatcagcctggtgatccgcggcacgcagggggccgaggaggtgctcagggcccacgaggagcagctcaaggaggcccaggccgtgccggccaccctcccggagctcgaggccaccaaggcctctctgaagaagctgcgggcccaggccgaggcacagcagcccacgttcgacgccctgcgggatgagctgcggggggcacaggaggtgggggagcgactgcagcagcggcacggggagcgggacgtggaggtggagcgctggcgggagcgggtcgcccagctgcttgagcgctggcaggctgtgctggcccagaccgacgtgcggcagcgcgagctcgagcaactgggccgccagctgcgttactaccgcgagagtgcagaccccttgggcgcctggctgcaggacgccaggcggcggcaggagcagatccaggccatgccgctggccgacagccaggctgtgcgggagcagctgcggcaggagcaggccctgctggaggagatcgagcgccacggcgagaaggtcgaggagtgccagaggtttgcgaaacagtacatcaacgccatcaaggactatgaactccagctggtgacgtacaaggcgcagcttgagccggtggcctccccggccaagaagcccaaggtccagtcgggatcagagagtgtcatccaggagtacgtggacctgcgtacgcactacagcgagctgaccacactgacgagccagtacatcaagttcatcagcgagactctgcggcgcatggaggaggaggagaggctggctgagcagcagcgggcagaggagcgcgagcggctggccgaggtggaggccgcgctggagaagcagcggcagctggccgaggcgcacgcccaggcaaaggcacaggcggagcgggaggcgaaggagctgcagcagcgcatgcaggaggaggtggtgcggcgggaggaggcggcggtggacgcgcagcagcagaagcgcagcattcaggaggagctgcagcagctgcggcagagctcggaggcggagatccaggccaaggcccggcaggcagaggcggctgagcgcagccggctgcgcatcgaggaggagatccgcgtggtgcgcctgcagttggaggccaccgagcgccagcgtggcggggctgagggggagctgcaggcactgcgtgcacgggcggaggaggctgaggcacaaaagcgacaggcgcaggaggaggccgagcgcttgcggaggcaggtgcaggacgagagccagcgtaagcggcaggcggaggtggagctggcctcgcgcgtgaaggccgaggccgaggcggcgcgcgagaagcagcgggccctgcaggccctggaggagctgcggctgcaggcggaggaggcggagcggcgcctgcggcaggccgaggtggagcgagcgcggcaggtacaggtggccctggagacggcgcagcgcagtgcagaggcggagctgcagagcaaacgcgcctccttcgccgagaagacggcacagctggagcgctccctgcaggaggaacacgtggctgtggcacagctgcgggaggaggctgagcggcgggcacagcagcaggccgaggccgagcgggcgcgcgaggaggcagagcgggagctggagcgctggcagctcaaggccaacgaggcgctacggctgcggctgcaggcggaggaggtggcgcagcagaagagcctggcgcaggccgaggctgagaagcagaaggaggaggcggagcgcgaggcgcggcggcgcggcaaggcggaggagcaggccgtccggcagcgggagctggctgaacaagagctggagaagcagcggcagctggcggaaggcaccgcgcagcagcgcctggccgcggagcaggagttgatccggctgcgggccgagacggagcagggggagcagcagcggcagctgctggaggaggagctggcccggctgcagcgtgaggcggctgcagccacgcagaaacggcaggagctggaagccgagctggccaaggtgcgggccgagatggaggtgctgctggccagcaaggcgagggctgaggaggagtcgcgctccaccagcgagaagtccaagcagaggctggaggccgaggccggccggttccgcgagctggccgaggaggccgcccgcctgcgtgccctggcggaagaggccaagcggcagcggcagctggccgaggaagacgcggcgcggcagcgggccgaggcggagcgggtgcttgcggagaagctggccgccatcggcgaggccacgcggctcaagacggaggcggagatcgcgctcaaggagaaggaggcggagaacgagcgcctgcggcggctggcggaggacgaggccttccagcggcggcggctggaggagcaggccgcgcaacacaaggctgacatcgaggagcgcctggcccagctgcgcaaggcatcggacagcgagctggagcggcagaaggggctggtggaggacacgctgaggcagcggcggcaggtggaggaggagatcctggcgctgaaggcgagcttcgagaaggcggccgctggcaaggcggagctggagctggagctgggacgcatccgcagcaacgcggaggacacgctgcgcagcaaggagcaggccgagctggaggctgcgaggcagcggcagctggcggcggaggaggagcggcggcgccgtgaggctgaggagcgcgtgcagaagagcctggcggccgaggaggaggccgcacggcagcggaaggcggcgctggaggaagtcgagcggctgaaagccaaggtggaggaggcgcggcgcctgcgggagcgagcggagcaggagtcggcgcggcagctgcagctggcccaggaggccgcccagaagcggctgcaggcggaagagaaggcacacgccttcgcggtgcagcagaaggagcaggagctacagcagacgctgcagcaggagcagagcgtgctggaccagctgcgcggcgaggcggaggcggcccggcgggcggctgaggaggcggaggaggcccgggtgcaggcggagcgtgaggcggcgcagtcccggcggcaggtggaagaggccgagcggctgaagcagtcggcagaggagcaggcacaggcccgggctcaggcacaggcggctgcagagaagctgcgcaaggaggccgagcaagaggcggcgcggcgggcacaggcggagcaggcggccctgcggcagaagcaggcagctgacgcggagatggagaagcataagaaattcgccgagcagacgctgcggcagaaggcgcaggtggagcaggagctgacaacactgcggctgcagctggaggagaccgaccaccagaagaacctgctggacgaggagctgcagcggctgaaggcggaggccacggaggccgcacgccagcgcagccaggtggaggaggagctcttctcggtgcgcgtgcagatggaggagctgagcaagctcaaggcacgcatcgaggctgagaaccgcgcactcatcttgcgtgacaaggacaatacgcagcgcttcctgcaggaggaggctgagaagatgaagcaggtggcggaggaggccgcgcggctgagtgtggcggcccaagaggctgcgcgactgcggcagctggcagaggaggacctggcacagcagcgggccttggcagagaagatgctcaaggagaagatgcaggcggtgcaggaggccacgcgactcaaggctgaggcggaactgctgcagcagcagaaggagcttgcgcaggagcaggcgcggcggctgcaggaggacaaggagcagatggcgcagcagctggcggaggagacgcagggcttccagcggacgctggaggccgagcggcagcggcagctggagatgagcgctgaggctgagcgcctcaagctgcgtgtggccgagatgagccgagcccaggcccgcgctgaggaggacgcccagcgcttccggaagcaggcggaggagatcggtgagaagctgcaccgcacggagctcgccacccaggagaaggtgaccctggtgcagacactggagatccagcgacagcagagtgaccatgatgccgagcgcctgcgggaggccatcgctgagctggagcgtgagaaggagaagctccaacaggaggccaaactgctgcagctcaagtctgaggaggatgcagacggtgcagcaggagcagctgctgcaggagacgcaggccctgcagcaaagcttcctctctgaaaaggacagcctgctacagcgggagcgcttcatcgagcaggagaaggccaagctggagcagctcttccaggacgaggtggccaaggcacagcagctgcgtgaggagcagcagcggcagcagcagcagatggagcaggaacggcagcggctggtggccagcatggaggaggcgcggcggcggcagcatgaggccgaggagggcgtgcggcgcaagcaggaggagctgcagcagctggagcagcagcggcggcagcaggaggagctgctggctgaggagaaccagaggctgcgtgagcagctgcagctcctggaggagcagcaccgggccgcgctggcgcactcagaggaggtcactgcctcgcaggtggctgccacaaagaccctgcccaatggccgggatgcacttgatggccccgcggcagaggcagagccggagcacagcttcgatggcctgcggcggaaggtgtcagctcagaggctgcaggaggccggcatcctgagtgcggaggagctgcagcggttggcgcagggccacaccacggtggacgagctcgcacggcgggaagacgtgcgccactacctgcagggccgcagcagtatcgcagggctgttgctgaaggccaccaatgagaagctgagtgtttacgccgccctgcagaggcagctgctgagtcccggcacggccctcatcctgctggaggcgcaggcggcctcaggcttcctgctggaccctgtgcggaaccggcggctgaccgtcaacgaggctgtgaaggagggtgtggtgggccccgagctgcaccacaagctgctgtcggccgagcgcgccgtcactggctacaaggacccctacactggccagcagatctctctcttccaagccatgcagaagggcctcatcgtccgggagcacggcatccgcctgctggaggcccagatcgccacgggcggcgttatcgaccccgtgcacagccaccgcgtgcccgtggacgtggcctaccggcgcggctacttcgacgaggagatgaaccgcgtcctggcggaccccagcgacgacaccaagggcttctttgaccccaacacgcacgagaacctcacgtacctgcagctactggagcgctgcgtggaggaccccgagacgggcctgtgccttctgccactcacggataaggctgccaagggcggggagctggtctacactgactccgaggcccgggacgtctttgagaaggccaccgtgtctgcgccgttcggcaagttccagggcaagacggtgaccatttgggagatcatcaactcggaatacttcacggcagagcagcggcgggacctgctgcggcagttccgcacgggccggatcacagtggagaagatcatcaagatcatcatcacggtggtggaggagcaggagcagaagggccggctttgctttgagggcctgcgcagcctggtgccagccgccgagctgctggagagcagggtcatcgaccgcgagctctaccagcagctgcagcgaggtgagcgctctgtgcgagacgtagccgaggtggacactgtgcggcgggctctccggggtgccaacgtcatcgcgggtgtatggctggaggaggcggggcagaagctgagtatctacaatgccctgaagaaagacctgctgccatccgacatggccgtggccctgttggaagcccaggccggcaccgggcacatcatcgaccccgccaccagcgcccggctgaccgtggacgaggcagtgcgtgctggcctggtgggccccgagtttcatgagaagctgctatcagccgagaaggctgtgacagggtacagggacccctacacagggcagagcgtctccctgttccaggccctgaagaagggcctcattccccgggagcagggcctgcgcctgttggacgcccagctgtccacgggcggcatcgtggaccccagcaagagccaccgcgtgcccctggatgtcgcctgcgcccgaggctgcctggatgaggagaccagcagggccctgtcggcaccaagggccgacgccaaggcctacagtgaccccagcacaggggagccggccacctacggcgagctccagcagcggtgccggcccgaccagctgaccgggctgagcctgctgccgctctcagaaaaggctgctcgggcccggcaggaggagctctactcagagctgcaggcccgtgagacctttgaaaagaccccggttgaggtccccgtgggtggcttcaagggcaggacggtgacggtgtgggagctcatcagctctgagtacttcactgcggagcagcggcaggagctgttgcgtcagttccgcacgggcaaggtcaccgtggagaaggtcatcaagattctcattaccatcgtggaggaggtggagaccctgcggcaggagaggctgtccttcagcggcctccgtgcccctgtgccagccagcgagctcctggcttccggggtcctcagcagagcccagtttgagcagctcaaggacggcaagacgacggtcaaggacctttcggagctgggctccgtgcggacgctgctgcagggcagtggctgcctcgccggcatctacctggaggacaccaaggagaaggtgtccatctacgaggccatgcgccggggcctgctgagagccacaacggctgcgctcctgctggaggcgcaggcggccactggcttcctggtggaccccgtgcggaaccagcgcctgtatgtccacgaggccgtgaaggcgggcgtggtgggccccgagcttcacgagcagctgctgtctgccgagaaggccgtcaccggctacagagacccctactcgggcagcaccatctccctcttccaggccatgcagaagggcctggttctccggcagcacggcatccgcctgctggaggcccagatcgccacgggcggcatcatcgaccccgtgcacagccaccgcgtgcctgtggacgtggcctaccagcgcggctacttcagtgaggagatgaaccgcgtcctggcggaccccagcgacgacaccaagggcttctttgaccccaacacgcatgagaacctcacgtacaggcagctgctggagcggtgcgtggaggaccccgagacgggcttgcgccttctgccactgaaaggggcggagaaggctgaggtggtggagaccacgcaggtgtacactgaggaggagacaagaagggcatttgaagagacacagatcgacattcccggcggcggcagccacggcggctccaccatgtccctgtgggaggtgatgcagtcggacctgatccccgaggagcagcgggcccagctgatggctgacttccaggccggccgggtgaccaaggaacgcatgatcatcatcatcatcgagatcattgagaagacagagatcatccgccagcagggtctggcctcctacgactacgtgcgccgccgcctcacggctgaggacctgttcgaggctcggatcatctctctcgagacctacaacctgctccgggagggcaccaggagcctccgtgaggctctcgaggcggagtccgcctggtgctacctctatggcacgggctccgtggctggtgtctacctgcccggttccaggcagacactgagcatctaccaggctctcaagaaagggctgctgagtgccgaggtggcccgcctgctgctggaggcacaggcagccacaggcttcctgctggacccggtgaagggggagcggctgactgtggatgaggctgtgcggaagggcctcgtggggcccgagctgcacgaccgcctgctctcggctgagcgggcggtcaccggctaccgtgacccctacaccgagcagaccatctcgctcttccaggccatgaagaaggagctgatccctactgaggaggccctgcggctgctggatgcccagctggccaccggcggcatcgtggacccccgcctgggcttccaccttcccctggaggtggcttaccagcgtggctacctcaacaaggacacgcacgaccagctgtcagagcccagcgaggtgcgcagctacgtggacccgtccaccgacgagcgcctcagctacacgcagctgctcaggcggtgccgtcgtgacgacggcaccggccagctgctcctgccactgtcggacgcccgcaagctgaccttccgtggcctgcggaagcagatcaccatggaggagctggtgcgctcgcaggtcatggacgaggccacggcgctgcagctgcgggagggcctgacctccatcgaggaggtcaccaagaacttgcagaagttcctggaaggcaccagctgcatcgctggtgtcttcgtggacgccaccaaggaacggctctcggtgtaccaggccatgaagaagggcatcatccgccccggcacagcctttgagctcctggaggcgcaggcggccaccggttacgtcatcgaccccatcaagggactgaagctgacggtggaggaggctgtgcgtatgggcattgtgggccccgagttcaaggacaagctgctgtcggccgagcgcgccgtcactgggtacaaggacccctactctgggaagctcatctccctcttccaggccatgaagaagggcctgatcctgaaggaccatggcatccgcctgctggaggcccagatcgccacgggcggcatcatcgaccctgaggagagccaccggctgcccgtggaggtggcctacaagcgcggcctcttcgatgaggagatgaacgagatcctgaccgacccctcggacgacaccaagggcttctttgaccctaacacggaggagaacctcacctacctgcagctgatggagcgttgtatcactgacccccagacgggcctgtgtctcttgccgctgaaggagaagaagcgggagcggaagacgtcctccaagtcctccgtgcgcaagcgccgagtggtcatcgtggaccccgagacgggcaaggagatgtcagtgtacgaggcctaccgcaagggcctgattgaccaccagacgtacctggagctgtccgagcaggagtgcgagtgggaggagatcaccatctcctcctcggacggcgtggtcaagtccatgatcatcgaccgccgctccgggcgccagtacgacatcgatgatgccatcgccaagaacctcatcgaccgctcggcactggaccagtaccgcgccggcacgctctccatcaccgagttcgccgacatgctctcgggcaacgccggtggtttccgctcccgttcctcctcggtgggatcctcctcctcctaccccatcagccccgccgtctccaggacccagctggcctcctggtcagaccccactgaggagacgggccccgtggctggcatcctggacacggagacgctggagaaggtgtccatcaccgaggccatgcaccggaacctggtggataacatcacggggcagcggctgctggaggcgcaggcctgcaccgggggcatcatcgaccccagcaccggtgagcgcttccctgtcaccgacgccgtcaacaagggcctggtggacaagatcatggtggaccgcatcaacctggcccagaaggccttctgcggcttcgaggacccacgcaccaagaccaagatgtcggccgcccaggccctgaagaagggctggctctactacgaggccggccagcgcttcctggaggtgcagtacctgaccggcggcttgatcgagcccgacacgccgggccgcgtgcccctggacgaggccctgcagcgcggcacggtggacgcccgcaccgcacagaagctgcgtgacgtgggcgcctactccaagtacctcacctgccctaagaccaagctcaagatctcctataaggacgcgctggaccgcagcatggtggaggagggcacggggctgcggctgctggaggctgccgcgcagtccaccaagggctactacagcccctacagcgtcagcggctccggctctaccgctggctcccgcaccggctcgcgcaccggctcccgggccggctcccgccgcggcagctttgacgccaccggctccggcttctccatgaccttctcttcatcctcctactcctcctcgggctacggccgccgctacgcctcggggtcctcggcctccctggggggccctgagtctgccgtggcctgaggctgcctgcgcccaccccgctctgcatgcggcccagcccggctcccaccgaggcgcgggggccgttttcaacgcttaaaggtgtcttcctcccaagtggtgcctaaagtttaaccaaaaagaccagactaatatattaatatatatctgctgtccagacagcctgtatcttgggggacagggctggcccagccctgctggccgcctcaccccctcgggtctcctcactcccttctacctgccactcacacagccaggtgccttggagggtcccaagctgggccccagcccaccctcctgtcttcccagggtagcccgcctgccagtcctagctgcacagggcagctgggcccaaccctgtctgtagagggccctggtgtttctagcactggcctgcacggtgggccttgctggggacggggggccccagtcagcctctctcccagtctacccagagaagccccttccccatgggaagacgaggccctcgggcccagcccccacagtgctgtctgatctgtgctttccagctcaccccccacactcactcctgagacccctggcctccggcgtcagcctccagcctctgttcccctagtaagtgccttccatgtcggcctctaaccccaggccccgaggacccagacccagtggggaggcggacgttccagccggcatggctgggaactgcagacctgtcctcctggtgggtccaggggcccctccagcttgtggagccccacactggggtgccgcctgcccgtctctctcccatggagccccagccccctttgggcccagggacaccagccaggctctgtgctgaccctcctgttgcacccagccctggtctcagcagcgaccacccctgcctccaccctctgagctttgcatgttccactaaccccgggcgggtggcaggtggaggtgtcaggctgctggcgcctctgcaagggcagaacactaacctgaccgtgggcggggccttgcggtatccgcccccaataaaagcaattccaacctt

SEQ ID NO: 531 - DNA, 14321 bp, Homo sapiens
ccaggaggccatgtcgggtgaggacgctgaggtccgggcagtctctgaagatgtctccaatggaagcagtggctcgcccagccctggggacacactgccctggaaccttgggaaaacgcagcggagccggcgcagcgggggtggcgctgggagcaacgggagtgtcctggacccagctgagcgggcggtcattcgcatcgcagatgagcgggatcgtgtgcagaagaaaaccttcaccaagtgggtcaacaagcacctcatcaaggcccagaggcacatcagtgacctgtatgaagacctccgcgatggccacaacctcatctccctgctggaggtcctctcgggggacagcctgccccgggagaaggggaggatgcgtttccacaagctgcagaatgtccagattgccctggactacctccggcaccgccaggtgaagctggtgaacatcaggaatgatgacatcgctgacggcaaccccaagctgacccttggcctcatctggacaatcattctgcacttccagatctcagatatccaggtgagtgggcagtcggaggacatgacggccaaggagaagctgctgctgtggtcgcagcgaatggtggaggggtaccagggcctgcgatgcgacaacttcacctccagctggagagacggccgcctcttcaatgccatcatccaccggcacaagcccctgctcatcgacatgaacaaggtgtaccggcagaccaacctggagaacctggaccaggccttctctgtggcggagcgggacctgggagtgacgcggctcctggaccctgaggacgtggatgtccctcagcccgacgagaagtccatcatcacctacgtctcgtcgctgtatgacgccatgccccgcgtgccggacgtgcaggatggggtgagggccaacgagctgcagctgcgctggcaggagtaccgggagctggtgctgctgctgcttcagtggatgcgacaccacacggccgcctttgaggaacgcaggttcccctccagcttcgaggagattgagatcctgtggtctcagttcctgaagtttaaggagatggagctaccagccaaggaggccgacaagaacaggtccaagggcatctaccaatccctggagggagcggtgcaagcaggccagctcaaggtgccccctggctaccacccgctggatgtggagaaggagtggggcaagctgcacgtggccatcctggagcgggagaagcagctccgcagcgagtttgagaggctggagtgtcttcagcgcatcgtgaccaagctgcagatggaggcggggctgtgtgaggagcagctgaaccaggccgacgccctgctgcagtcggatgtccggctgctggctgcaggcaaagtgccacagcgggcgggggaggtggaacgggacttggacaaggcggatagcatgatccggctgctcttcaacgacgtgcagaccctcaaggatggacggcacccgcagggcgagcagatgtaccgcagggtgtaccgtctgcacgagcgcctggtagccatccgcaccgagtacaacctacggctgaaggcaggcgtggcggcccctgcaacccaggtggtccaggtgactctgcagagtgtgcagaggcgccccgagctggaggactccactctgcgctacctgcaggacctgctggcctgggtggaggagaaccagcaccgtgtggatggcgctgagtggggtgtggacctgcccagcgtggaggcgcagctgggcagccaccgaggcctgcaccagtccatcgaagaattccgggccaagatcgagcgggcacggagtgacgagggccagctctcccccgccacccggggtgcctaccgtgactgcctgggtcggctggacctgcagtacgccaagctgctgaactcctccaaggcccgcctcaggtccctggagagcttgcacagctttgtggcagccgccactaaggagctaatgtggctgaatgagaaggaggaggaggaggtgggcttcgactggagcgaccgcaacaccaacatgaccgccaagaaggagagctactcggcgctgatgcgggagctggagctgaaggagaagaagatcaaggagctccaaaatgctggggaccggctgctgcgggaggaccacccggcccggcccacggtggagtccttccaggcggccctgcagacgcagtggagctggatgctacagctgtgctgctgtatcgaggcacacctgaaggagaacgctgcctactttcagttcttctcagatgtgcgggaggccgaggggcagttgcagaagctgcaggaggcactgcgtaggaaatacagttgtgatcgctccgccaccgtcacccggctggaggacctgctgcaggatgcccaggacgagaaggaacagctgaacgagtacaagggccacctctcaggcctggccaagcgggccaaggccgtcgtgcagctgaagccccgccacccagcccaccccatgcggggccgcctgcccctgctggccgtgtgcgactataagcaggtggaggtgactgtgcacaagggtgacgagtgccagctggtgggccctgcacagccgtcccactggaaggtgctcagcagctccggcagcgaggccgccgtgccctccgtgtgcttcctggtgcccccgcccaaccaggaggcccaggaggccgtcaccaggctggaggcccagcaccaggccctggtcacgctgtggcaccagttgcacgtggacatgaagagccttctggcctggcagagccttcgccgcgacgtgcagctcatccgctcctggtccctggccacgttccgcaccctgaagccagaggagcagcgccaagccctgcacagcctggagctgcactaccaggccttcctgcgggacagccaggacgcgggcggcttcggacccgaggaccggctgatggctgagcgcgagtacggctcctgcagccaccactaccagcagctgctgcagagcctggaacaggaaggcacaggcagaggtggaggggctgggcaagggggtcgcccggctctctgccgaggccgagaaggtcttggccctaccagagccatcgcctgcggcccccacgctgcgctcggagctggagctgacgctgggcaagctggagcaggtccgcagcctgtctgccatctacctggagaagctcaagaccatcagcctggtgatccgcggcacgcagggggccgaggaggtgctcagggcccacgaggagcagctcaaggaggcccaggccgtgccggccaccctcccggagctcgaggccaccaaggcctctctgaagaagctgcgggcccaggccgaggcacagcagcccacgttcgacgccctgcgggatgagctgcggggggcacaggaggtgggggagcgactgcagcagcggcacggggagcgggacgtggaggtggagcgctggcgggagcgggtcgcccagctgcttgagcgctggcaggctgtgctggcccagaccgacgtgcggcagcgcgagctcgagcaactgggccgccagctgcgttactaccgcgagagtgcagaccccttgggcgcctggctgcaggacgccaggcggcggcaggagcagatccaggccatgccgctggccgacagccaggctgtgcgggagcagctgcggcaggagcaggccctgctggaggagatcgagcgccacggcgagaaggtcgaggagtgccagaggtttgcgaaacagtacatcaacgccatcaaggactatgaactccagctggtgacgtacaaggcgcagcttgagccggtggcctccccggccaagaagcccaaggtccagtcgggatcagagagtgtcatccaggagtacgtggacctgcgtacgcactacagcgagctgaccacactgacgagccagtacatcaagttcatcagcgagactctgcggcgcatggaggaggaggagaggctggctgagcagcagcgggcagaggagcgcgagcggctggccgaggtggaggccgcgctggagaagcagcggcagctggccgaggcgcacgcccaggcaaaggcacaggcggagcgggaggcgaaggagctgcagcagcgcatgcaggaggaggtggtgcggcgggaggaggcggcggtggacgcgcagcagcagaagcgcagcattcaggaggagctgcagcagctgcggcagagctcggaggcggagatccaggccaaggcccggcaggcagaggcggctgagcgcagccggctgcgcatcgaggaggagatccgcgtggtgcgcctgcagttggaggccaccgagcgccagcgtggcggggctgagggggagctgcaggcactgcgtgcacgggcggaggaggctgaggcacaaaagcgacaggcgcaggaggaggccgagcgcttgcggaggcaggtgcaggacgagagccagcgtaagcggcaggcggaggtggagctggcctcgcgcgtgaaggccgaggccgaggcggcgcgcgagaagcagcgggccctgcaggccctggaggagctgcggctgcaggcggaggaggcggagcggcgcctgcggcaggccgaggtggagcgagcgcggcaggtacaggtggccctggagacggcgcagcgcagtgcagaggcggagctgcagagcaaacgcgcctccttcgccgagaagacggcacagctggagcgctccctgcaggaggaacacgtggctgtggcacagctgcgggaggaggctgagcggcgggcacagcagcaggccgaggccgagcgggcgcgcgaggaggcagagcgggagctggagcgctggcagctcaaggccaacgaggcgctacggctgcggctgcaggcggaggaggtggcgcagcagaagagcctggcgcaggccgaggctgagaagcagaaggaggaggcggagcgcgaggcgcggcggcgcggcaaggcggaggagcaggccgtccggcagcgggagctggctgaacaagagctggagaagcagcggcagctggcggaaggcaccgcgcagcagcgcctggccgcggagcaggagttgatccggctgcgggccgagacggagcagggggagcagcagcggcagctgctggaggaggagctggcccggctgcagcgtgaggcggctgcagccacgcagaaacggcaggagctggaagccgagctggccaaggtgcgggccgagatggaggtgctgctggccagcaaggcgagggctgaggaggagtcgcgctccaccagcgagaagtccaagcagaggctggaggccgaggccggccggttccgcgagctggccgaggaggccgcccgcctgcgtgccctggcggaagaggccaagcggcagcggcagctggccgaggaagacgcggcgcggcagcgggccgaggcggagcgggtgcttgcggagaagctggccgccatcggcgaggccacgcggctcaagacggaggcggagatcgcgctcaaggagaaggaggcggagaacgagcgcctgcggcggctggcggaggacgaggccttccagcggcggcggctggaggagcaggccgcgcaacacaaggctgacatcgaggagcgcctggcccagctgcgcaaggcatcggacagcgagctggagcggcagaaggggctggtggaggacacgctgaggcagcggcggcaggtggaggaggagatcctggcgctgaaggcgagcttcgagaaggcggccgctggcaaggcggagctggagctggagctgggacgcatccgcagcaacgcggaggacacgctgcgcagcaaggagcaggccgagctggaggctgcgaggcagcggcagctggcggcggaggaggagcggcggcgccgtgaggctgaggagcgcgtgcagaagagcctggcggccgaggaggaggccgcacggcagcggaaggcggcgctggaggaagtcgagcggctgaaagccaaggtggaggaggcgcggcgcctgcgggagcgagcggagcaggagtcggcgcggcagctgcagctggcccaggaggccgcccagaagcggctgcaggcggaagagaaggcacacgccttcgcggtgcagcagaaggagcaggagctacagcagacgctgcagcaggagcagagcgtgctggaccagctgcgcggcgaggcggaggcggcccggcgggcggctgaggaggcggaggaggcccgggtgcaggcggagcgtgaggcggcgcagtcccggcggcaggtggaagaggccgagcggctgaagcagtcggcagaggagcaggcacaggcccgggctcaggcacaggcggctgcagagaagctgcgcaaggaggccgagcaagaggcggcgcggcgggcacaggcggagcaggcggccctgcggcagaagcaggcagctgacgcggagatggagaagcataagaaattcgccgagcagacgctgcggcagaaggcgcaggtggagcaggagctgacaacactgcggctgcagctggaggagaccgaccaccagaagaacctgctggacgaggagctgcagcggctgaaggcggaggccacggaggccgcacgccagcgcagccaggtggaggaggagctcttctcggtgcgcgtgcagatggaggagctgagcaagctcaaggcacgcatcgaggctgagaaccgcgcactcatcttgcgtgacaaggacaatacgcagcgcttcctgcaggaggaggctgagaagatgaagcaggtggcggaggaggccgcgcggctgagtgtggcggcccaagaggctgcgcgactgcggcagctggcagaggaggacctggcacagcagcgggccttggcagagaagatgctcaaggagaagatgcaggcggtgcaggaggccacgcgactcaaggctgaggcggaactgctgcagcagcagaaggagcttgcgcaggagcaggcgcggcggctgcaggaggacaaggagcagatggcgcagcagctggcggaggagacgcagggcttccagcggacgctggaggccgagcggcagcggcagctggagatgagcgctgaggctgagcgcctcaagctgcgtgtggccgagatgagccgagcccaggcccgcgctgaggaggacgcccagcgcttccggaagcaggcggaggagatcggtgagaagctgcaccgcacggagctcgccacccaggagaaggtgaccctggtgcagacactggagatccagcgacagcagagtgaccatgatgccgagcgcctgcgggaggccatcgctgagctggagcgtgagaaggagaagctccaacaggaggccaaactgctgcagctcaagtctgaggaggatgcagacggtgcagcaggagcagctgctgcaggagacgcaggccctgcagcaaagcttcctctctgaaaaggacagcctgctacagcgggagcgcttcatcgagcaggagaaggccaagctggagcagctcttccaggacgaggtggccaaggcacagcagctgcgtgaggagcagcagcggcagcagcagcagatggagcaggaacggcagcggctggtggccagcatggaggaggcgcggcggcggcagcatgaggccgaggagggcgtgcggcgcaagcaggaggagctgcagcagctggagcagcagcggcggcagcaggaggagctgctggctgaggagaaccagaggctgcgtgagcagctgcagctcctggaggagcagcaccgggccgcgctggcgcactcagaggaggtcactgcctcgcaggtggctgccacaaagaccctgcccaatggccgggatgcacttgatggccccgcggcagaggcagagccggagcacagcttcgatggcctgcggcggaaggtgtcagctcagaggctgcaggaggccggcatcctgagtgcggaggagctgcagcggttggcgcagggccacaccacggtggacgagctcgcacggcgggaagacgtgcgccactacctgcagggccgcagcagtatcgcagggctgttgctgaaggccaccaatgagaagctgagtgtttacgccgccctgcagaggcagctgctgagtcccggcacggccctcatcctgctggaggcgcaggcggcctcaggcttcctgctggaccctgtgcggaaccggcggctgaccgtcaacgaggctgtgaaggagggtgtggtgggccccgagctgcaccacaagctgctgtcggccgagcgcgccgtcactggctacaaggacccctacactggccagcagatctctctcttccaagccatgcagaagggcctcatcgtccgggagcacggcatccgcctgctggaggcccagatcgccacgggcggcgttatcgaccccgtgcacagccaccgcgtgcccgtggacgtggcctaccggcgcggctacttcgacgaggagatgaaccgcgtcctggcggaccccagcgacgacaccaagggcttctttgaccccaacacgcacgagaacctcacgtacctgcagctactggagcgctgcgtggaggaccccgagacgggcctgtgccttctgccactcacggataaggctgccaagggcggggagctggtctacactgactccgaggcccgggacgtctttgagaaggccaccgtgtctgcgccgttcggcaagttccagggcaagacggtgaccatttgggagatcatcaactcggaatacttcacggcagagcagcggcgggacctgctgcggcagttccgcacgggccggatcacagtggagaagatcatcaagatcatcatcacggtggtggaggagcaggagcagaagggccggctttgctttgagggcctgcgcagcctggtgccagccgccgagctgctggagagcagggtcatcgaccgcgagctctaccagcagctgcagcgaggtgagcgctctgtgcgagacgtagccgaggtggacactgtgcggcgggctctccggggtgccaacgtcatcgcgggtgtatggctggaggaggcggggcagaagctgagtatctacaatgccctgaagaaagacctgctgccatccgacatggccgtggccctgttggaagcccaggccggcaccgggcacatcatcgaccccgccaccagcgcccggctgaccgtggacgaggcagtgcgtgctggcctggtgggccccgagtttcatgagaagctgctatcagccgagaaggctgtgacagggtacagggacccctacacagggcagagcgtctccctgttccaggccctgaagaagggcctcattccccgggagcagggcctgcgcctgttggacgcccagctgtccacgggcggcatcgtggaccccagcaagagccaccgcgtgcccctggatgtcgcctgcgcccgaggctgcctggatgaggagaccagcagggccctgtcggcaccaagggccgacgccaaggcctacagtgaccccagcacaggggagccggccacctacggcgagctccagcagcggtgccggcccgaccagctgaccgggctgagcctgctgccgctctcagaaaaggctgctcgggcccggcaggaggagctctactcagagctgcaggcccgtgagacctttgaaaagaccccggttgaggtccccgtgggtggcttcaagggcaggacggtgacggtgtgggagctcatcagctctgagtacttcactgcggagcagcggcaggagctgttgcgtcagttccgcacgggcaaggtcaccgtggagaaggtcatcaagattctcattaccatcgtggaggaggtggagaccctgcggcaggagaggctgtccttcagcggcctccgtgcccctgtgccagccagcgagctcctggcttccggggtcctcagcagagcccagtttgagcagctcaaggacggcaagacgacggtcaaggacctttcggagctgggctccgtgcggacgctgctgcagggcagtggctgcctcgccggcatctacctggaggacaccaaggagaaggtgtccatctacgaggccatgcgccggggcctgctgagagccacaacggctgcgctcctgctggaggcgcaggcggccactggcttcctggtggaccccgtgcggaaccagcgcctgtatgtccacgaggccgtgaaggcgggcgtggtgggccccgagcttcacgagcagctgctgtctgccgagaaggccgtcaccggctacagagacccctactcgggcagcaccatctccctcttccaggccatgcagaagggcctggttctccggcagcacggcatccgcctgctggaggcccagatcgccacgggcggcatcatcgaccccgtgcacagccaccgcgtgcctgtggacgtggcctaccagcgcggctacttcagtgaggagatgaaccgcgtcctggcggaccccagcgacgacaccaagggcttctttgaccccaacacgcatgagaacctcacgtacaggcagctgctggagcggtgcgtggaggaccccgagacgggcttgcgccttctgccactgaaaggggcggagaaggctgaggtggtggagaccacgcaggtgtacactgaggaggagacaagaagggcatttgaagagacacagatcgacattcccggcggcggcagccacggcggctccaccatgtccctgtgggaggtgatgcagtcggacctgatccccgaggagcagcgggcccagctgatggctgacttccaggccggccgggtgaccaaggaacgcatgatcatcatcatcatcgagatcattgagaagacagagatcatccgccagcagggtctggcctcctacgactacgtgcgccgccgcctcacggctgaggacctgttcgaggctcggatcatctctctcgagacctacaacctgctccgggagggcaccaggagcctccgtgaggctctcgaggcggagtccgcctggtgctacctctatggcacgggctccgtggctggtgtctacctgcccggttccaggcagacactgagcatctaccaggctctcaagaaagggctgctgagtgccgaggtggcccgcctgctgctggaggcacaggcagccacaggcttcctgctggacccggtgaagggggagcggctgactgtggatgaggctgtgcggaagggcctcgtggggcccgagctgcacgaccgcctgctctcggctgagcgggcggtcaccggctaccgtgacccctacaccgagcagaccatctcgctcttccaggccatgaagaaggagctgatccctactgaggaggccctgcggctgctggatgcccagctggccaccggcggcatcgtggacccccgcctgggcttccaccttcccctggaggtggcttaccagcgtggctacctcaacaaggacacgcacgaccagctgtcagagcccagcgaggtgcgcagctacgtggacccgtccaccgacgagcgcctcagctacacgcagctgctcaggcggtgccgtcgtgacgacggcaccggccagctgctcctgccactgtcggacgcccgcaagctgaccttccgtggcctgcggaagcagatcaccatggaggagctggtgcgctcgcaggtcatggacgaggccacggcgctgcagctgcgggagggcctgacctccatcgaggaggtcaccaagaacttgcagaagttcctggaaggcaccagctgcatcgctggtgtcttcgtggacgccaccaaggaacggctctcggtgtaccaggccatgaagaagggcatcatccgccccggcacagcctttgagctcctggaggcgcaggcggccaccggttacgtcatcgaccccatcaagggactgaagctgacggtggaggaggctgtgcgtatgggcattgtgggccccgagttcaaggacaagctgctgtcggccgagcgcgccgtcactgggtacaaggacccctactctgggaagctcatctccctcttccaggccatgaagaagggcctgatcctgaaggaccatggcatccgcctgctggaggcccagatcgccacgggcggcatcatcgaccctgaggagagccaccggctgcccgtggaggtggcctacaagcgcggcctcttcgatgaggagatgaacgagatcctgaccgacccctcggacgacaccaagggcttctttgaccctaacacggaggagaacctcacctacctgcagctgatggagcgttgtatcactgacccccagacgggcctgtgtctcttgccgctgaaggagaagaagcgggagcggaagacgtcctccaagtcctccgtgcgcaagcgccgagtggtcatcgtggaccccgagacgggcaaggagatgtcagtgtacgaggcctaccgcaagggcctgattgaccaccagacgtacctggagctgtccgagcaggagtgcgagtgggaggagatcaccatctcctcctcggacggcgtggtcaagtccatgatcatcgaccgccgctccgggcgccagtacgacatcgatgatgccatcgccaagaacctcatcgaccgctcggcactggaccagtaccgcgccggcacgctctccatcaccgagttcgccgacatgctctcgggcaacgccggtggtttccgctcccgttcctcctcggtgggatcctcctcctcctaccccatcagccccgccgtctccaggacccagctggcctcctggtcagaccccactgaggagacgggccccgtggctggcatcctggacacggagacgctggagaaggtgtccatcaccgaggccatgcaccggaacctggtggataacatcacggggcagcggctgctggaggcgcaggcctgcaccgggggcatcatcgaccccagcaccggtgagcgcttccctgtcaccgacgccgtcaacaagggcctggtggacaagatcatggtggaccgcatcaacctggcccagaaggccttctgcggcttcgaggacccacgcaccaagaccaagatgtcggccgcccaggccctgaagaagggctggctctactacgaggccggccagcgcttcctggaggtgcagtacctgaccggcggcttgatcgagcccgacacgccgggccgcgtgcccctggacgaggccctgcagcgcggcacggtggacgcccgcaccgcacagaagctgcgtgacgtgggcgcctactccaagtacctcacctgccctaagaccaagctcaagatctcctataaggacgcgctggaccgcagcatggtggaggagggcacggggctgcggctgctggaggctgccgcgcagtccaccaagggctactacagcccctacagcgtcagcggctccggctctaccgctggctcccgcaccggctcgcgcaccggctcccgggccggctcccgccgcggcagctttgacgccaccggctccggcttctccatgaccttctcttcatcctcctactcctcctcgggctacggccgccgctacgcctcggggtcctcggcctccctggggggccctgagtctgccgtggcctgaggctgcctgcgcccaccccgctctgcatgcggcccagcccggctcccaccgaggcgcgggggccgttttcaacgcttaaaggtgtcttcctcccaagtggtgcctaaagtttaaccaaaaagaccagactaatatattaatatatatctgctgtccagacagcctgtatcttgggggacagggctggcccagccctgctggccgcctcaccccctcgggtctcctcactcccttctacctgccactcacacagccaggtgccttggagggtcccaagctgggccccagcccaccctcctgtcttcccagggtagcccgcctgccagtcctagctgcacagggcagctgggcccaaccctgtctgtagagggccctggtgtttctagcactggcctgcacggtgggccttgctggggacggggggccccagtcagcctctctcccagtctacccagagaagccccttccccatgggaagacgaggccctcgggcccagcccccacagtgctgtctgatctgtgctttccagctcaccccccacactcactcctgagacccctggccctcctgttgcacccagccctggtctcagcagcgaccacccctgcctccaccctctgagctttgcatgttccactaaccccgggcgggtggcaggtggaggtgtcaggctgctggcgcctctgcaagggcagaacactaacctgaccgtgggcggggccttgcggtatccgcccccaat

SEQ ID NO: 532 - DNA, 14641 bp, Homo sapiens
atggtggccggcatgctcatgccacgggaccagctgcgggccatctatgaggtgctcttccgcgagggcgtgatggtggccaagaaggaccggcggccccgcagcttgcacccccatgtgcccggcgtcaccaacctgcaggtcatgcgtgccatggcgtccctgcgggcacggggcctggtccgcgagacctttgcctggtgccacttttactggtacctcaccaatgaaggcatcgcccacctccgccagtacctgcacctgccgccagagatcgtgcccgcctctctgcagcgcgtgcgccgccccgtcgccatggtgatgcccgcacgccgcaccccccacgtgcaggctgtgcagggtcccctgggctccccacccaagcgggggccgctgccgacggaggagcagcgggtctaccgtcggaaggagcttgaggaggtgtcacctgagacccctgtggtgcctgctaccacccagcggaccctggccaggccaggcccggagcctgccccagccacagatgagcgggatcgtgtgcagaagaaaaccttcaccaagtgggtcaacaagcacctcatcaaggcccagaggcacatcagtgacctgtatgaagacctccgcgatggccacaacctcatctccctgctggaggtcctctcgggggacagcctgccccgggagaaggggaggatgcgtttccacaagctgcagaatgtccagattgccctggactacctccggcaccgccaggtgaagctggtgaacatcaggaatgatgacatcgctgacggcaaccccaagctgacccttggcctcatctggacaatcattctgcacttccagatctcagatatccaggtgagtgggcagtcggaggacatgacggccaaggagaagctgctgctgtggtcgcagcgaatggtggaggggtaccagggcctgcgatgcgacaacttcacctccagctggagagacggccgcctcttcaatgccatcatccaccggcacaagcccctgctcatcgacatgaacaaggtgtaccggcagaccaacctggagaacctggaccaggccttctctgtggcggagcgggacctgggagtgacgcggctcctggaccctgaggacgtggatgtccctcagcccgacgagaagtccatcatcacctacgtctcgtcgctgtatgacgccatgccccgcgtgccggacgtgcaggatggggtgagggccaacgagctgcagctgcgctggcaggagtaccgggagctggtgctgctgctgcttcagtggatgcgacaccacacggccgcctttgaggaacgcaggttcccctccagcttcgaggagattgagatcctgtggtctcagttcctgaagtttaaggagatggagctaccagccaaggaggccgacaagaacaggtccaagggcatctaccaatccctggagggagcggtgcaagcaggccagctcaaggtgccccctggctaccacccgctggatgtggagaaggagtggggcaagctgcacgtggccatcctggagcgggagaagcagctccgcagcgagtttgagaggctggagtgtcttcagcgcatcgtgaccaagctgcagatggaggcggggctgtgtgaggagcagctgaaccaggccgacgccctgctgcagtcggatgtccggctgctggctgcaggcaaagtgccacagcgggcgggggaggtggaacgggacttggacaaggcggatagcatgatccggctgctcttcaacgacgtgcagaccctcaaggatggacggcacccgcagggcgagcagatgtaccgcagggtgtaccgtctgcacgagcgcctggtagccatccgcaccgagtacaacctacggctgaaggcaggcgtggcggcccctgcaacccaggtggtccaggtgactctgcagagtgtgcagaggcgccccgagctggaggactccactctgcgctacctgcaggacctgctggcctgggtggaggagaaccagcaccgtgtggatggcgctgagtggggtgtggacctgcccagcgtggaggcgcagctgggcagccaccgaggcctgcaccagtccatcgaagaattccgggccaagatcgagcgggcacggagtgacgagggccagctctcccccgccacccggggtgcctaccgtgactgcctgggtcggctggacctgcagtacgccaagctgctgaactcctccaaggcccgcctcaggtccctggagagcttgcacagctttgtggcagccgccactaaggagctaatgtggctgaatgagaaggaggaggaggaggtgggcttcgactggagcgaccgcaacaccaacatgaccgccaagaaggagagctactcggcgctgatgcgggagctggagctgaaggagaagaagatcaaggagctccaaaatgctggggaccggctgctgcgggaggaccacccggcccggcccacggtggagtccttccaggcggccctgcagacgcagtggagctggatgctacagctgtgctgctgtatcgaggcacacctgaaggagaacgctgcctactttcagttcttctcagatgtgcgggaggccgaggggcagttgcagaagctgcaggaggcactgcgtaggaaatacagttgtgatcgctccgccaccgtcacccggctggaggacctgctgcaggatgcccaggacgagaaggaacagctgaacgagtacaagggccacctctcaggcctggccaagcgggccaaggccgtcgtgcagctgaagccccgccacccagcccaccccatgcggggccgcctgcccctgctggccgtgtgcgactataagcaggtggaggtgactgtgcacaagggtgacgagtgccagctggtgggccctgcacagccgtcccactggaaggtgctcagcagctccggcagcgaggccgccgtgccctccgtgtgcttcctggtgcccccgcccaaccaggaggcccaggaggccgtcaccaggctggaggcccagcaccaggccctggtcacgctgtggcaccagttgcacgtggacatgaagagccttctggcctggcagagccttcgccgcgacgtgcagctcatccgctcctggtccctggccacgttccgcaccctgaagccagaggagcagcgccaagccctgcacagcctggagctgcactaccaggccttcctgcgggacagccaggacgcgggcggcttcggacccgaggaccggctgatggctgagcgcgagtacggctcctgcagccaccactaccagcagctgctgcagagcctggaacaggaaggcacaggcagaggtggaggggctgggcaagggggtcgcccggctctctgccgaggccgagaaggtcttggccctaccagagccatcgcctgcggcccccacgctgcgctcggagctggagctgacgctgggcaagctggagcaggtccgcagcctgtctgccatctacctggagaagctcaagaccatcagcctggtgatccgcggcacgcagggggccgaggaggtgctcagggcccacgaggagcagctcaaggaggcccaggccgtgccggccaccctcccggagctcgaggccaccaaggcctctctgaagaagctgcgggcccaggccgaggcacagcagcccacgttcgacgccctgcgggatgagctgcggggggcacaggaggtgggggagcgactgcagcagcggcacggggagcgggacgtggaggtggagcgctggcgggagcgggtcgcccagctgcttgagcgctggcaggctgtgctggcccagaccgacgtgcggcagcgcgagctcgagcaactgggccgccagctgcgttactaccgcgagagtgcagaccccttgggcgcctggctgcaggacgccaggcggcggcaggagcagatccaggccatgccgctggccgacagccaggctgtgcgggagcagctgcggcaggagcaggccctgctggaggagatcgagcgccacggcgagaaggtcgaggagtgccagaggtttgcgaaacagtacatcaacgccatcaaggactatgaactccagctggtgacgtacaaggcgcagcttgagccggtggcctccccggccaagaagcccaaggtccagtcgggatcagagagtgtcatccaggagtacgtggacctgcgtacgcactacagcgagctgaccacactgacgagccagtacatcaagttcatcagcgagactctgcggcgcatggaggaggaggagaggctggctgagcagcagcgggcagaggagcgcgagcggctggccgaggtggaggccgcgctggagaagcagcggcagctggccgaggcgcacgcccaggcaaaggcacaggcggagcgggaggcgaaggagctgcagcagcgcatgcaggaggaggtggtgcggcgggaggaggcggcggtggacgcgcagcagcagaagcgcagcattcaggaggagctgcagcagctgcggcagagctcggaggcggagatccaggccaaggcccggcaggcagaggcggctgagcgcagccggctgcgcatcgaggaggagatccgcgtggtgcgcctgcagttggaggccaccgagcgccagcgtggcggggctgagggggagctgcaggcactgcgtgcacgggcggaggaggctgaggcacaaaagcgacaggcgcaggaggaggccgagcgcttgcggaggcaggtgcaggacgagagccagcgtaagcggcaggcggaggtggagctggcctcgcgcgtgaaggccgaggccgaggcggcgcgcgagaagcagcgggccctgcaggccctggaggagctgcggctgcaggcggaggaggcggagcggcgcctgcggcaggccgaggtggagcgagcgcggcaggtacaggtggccctggagacggcgcagcgcagtgcagaggcggagctgcagagcaaacgcgcctccttcgccgagaagacggcacagctggagcgctccctgcaggaggaacacgtggctgtggcacagctgcgggaggaggctgagcggcgggcacagcagcaggccgaggccgagcgggcgcgcgaggaggcagagcgggagctggagcgctggcagctcaaggccaacgaggcgctacggctgcggctgcaggcggaggaggtggcgcagcagaagagcctggcgcaggccgaggctgagaagcagaaggaggaggcggagcgcgaggcgcggcggcgcggcaaggcggaggagcaggccgtccggcagcgggagctggctgaacaagagctggagaagcagcggcagctggcggaaggcaccgcgcagcagcgcctggccgcggagcaggagttgatccggctgcgggccgagacggagcagggggagcagcagcggcagctgctggaggaggagctggcccggctgcagcgtgaggcggctgcagccacgcagaaacggcaggagctggaagccgagctggccaaggtgcgggccgagatggaggtgctgctggccagcaaggcgagggctgaggaggagtcgcgctccaccagcgagaagtccaagcagaggctggaggccgaggccggccggttccgcgagctggccgaggaggccgcccgcctgcgtgccctggcggaagaggccaagcggcagcggcagctggccgaggaagacgcggcgcggcagcgggccgaggcggagcgggtgcttgcggagaagctggccgccatcggcgaggccacgcggctcaagacggaggcggagatcgcgctcaaggagaaggaggcggagaacgagcgcctgcggcggctggcggaggacgaggccttccagcggcggcggctggaggagcaggccgcgcaacacaaggctgacatcgaggagcgcctggcccagctgcgcaaggcatcggacagcgagctggagcggcagaaggggctggtggaggacacgctgaggcagcggcggcaggtggaggaggagatcctggcgctgaaggcgagcttcgagaaggcggccgctggcaaggcggagctggagctggagctgggacgcatccgcagcaacgcggaggacacgctgcgcagcaaggagcaggccgagctggaggctgcgaggcagcggcagctggcggcggaggaggagcggcggcgccgtgaggctgaggagcgcgtgcagaagagcctggcggccgaggaggaggccgcacggcagcggaaggcggcgctggaggaagtcgagcggctgaaagccaaggtggaggaggcgcggcgcctgcgggagcgagcggagcaggagtcggcgcggcagctgcagctggcccaggaggccgcccagaagcggctgcaggcggaagagaaggcacacgccttcgcggtgcagcagaaggagcaggagctacagcagacgctgcagcaggagcagagcgtgctggaccagctgcgcggcgaggcggaggcggcccggcgggcggctgaggaggcggaggaggcccgggtgcaggcggagcgtgaggcggcgcagtcccggcggcaggtggaagaggccgagcggctgaagcagtcggcagaggagcaggcacaggcccgggctcaggcacaggcggctgcagagaagctgcgcaaggaggccgagcaagaggcggcgcggcgggcacaggcggagcaggcggccctgcggcagaagcaggcagctgacgcggagatggagaagcataagaaattcgccgagcagacgctgcggcagaaggcgcaggtggagcaggagctgacaacactgcggctgcagctggaggagaccgaccaccagaagaacctgctggacgaggagctgcagcggctgaaggcggaggccacggaggccgcacgccagcgcagccaggtggaggaggagctcttctcggtgcgcgtgcagatggaggagctgagcaagctcaaggcacgcatcgaggctgagaaccgcgcactcatcttgcgtgacaaggacaatacgcagcgcttcctgcaggaggaggctgagaagatgaagcaggtggcggaggaggccgcgcggctgagtgtggcggcccaagaggctgcgcgactgcggcagctggcagaggaggacctggcacagcagcgggccttggcagagaagatgctcaaggagaagatgcaggcggtgcaggaggccacgcgactcaaggctgaggcggaactgctgcagcagcagaaggagcttgcgcaggagcaggcgcggcggctgcaggaggacaaggagcagatggcgcagcagctggcggaggagacgcagggcttccagcggacgctggaggccgagcggcagcggcagctggagatgagcgctgaggctgagcgcctcaagctgcgtgtggccgagatgagccgagcccaggcccgcgctgaggaggacgcccagcgcttccggaagcaggcggaggagatcggtgagaagctgcaccgcacggagctcgccacccaggagaaggtgaccctggtgcagacactggagatccagcgacagcagagtgaccatgatgccgagcgcctgcgggaggccatcgctgagctggagcgtgagaaggagaagctccaacaggaggccaaactgctgcagctcaagtctgaggaggatgcagacggtgcagcaggagcagctgctgcaggagacgcaggccctgcagcaaagcttcctctctgaaaaggacagcctgctacagcgggagcgcttcatcgagcaggagaaggccaagctggagcagctcttccaggacgaggtggccaaggcacagcagctgcgtgaggagcagcagcggcagcagcagcagatggagcaggaacggcagcggctggtggccagcatggaggaggcgcggcggcggcagcatgaggccgaggagggcgtgcggcgcaagcaggaggagctgcagcagctggagcagcagcggcggcagcaggaggagctgctggctgaggagaaccagaggctgcgtgagcagctgcagctcctggaggagcagcaccgggccgcgctggcgcactcagaggaggtcactgcctcgcaggtggctgccacaaagaccctgcccaatggccgggatgcacttgatggccccgcggcagaggcagagccggagcacagcttcgatggcctgcggcggaaggtgtcagctcagaggctgcaggaggccggcatcctgagtgcggaggagctgcagcggttggcgcagggccacaccacggtggacgagctcgcacggcgggaagacgtgcgccactacctgcagggccgcagcagtatcgcagggctgttgctgaaggccaccaatgagaagctgagtgtttacgccgccctgcagaggcagctgctgagtcccggcacggccctcatcctgctggaggcgcaggcggcctcaggcttcctgctggaccctgtgcggaaccggcggctgaccgtcaacgaggctgtgaaggagggtgtggtgggccccgagctgcaccacaagctgctgtcggccgagcgcgccgtcactggctacaaggacccctacactggccagcagatctctctcttccaagccatgcagaagggcctcatcgtccgggagcacggcatccgcctgctggaggcccagatcgccacgggcggcgttatcgaccccgtgcacagccaccgcgtgcccgtggacgtggcctaccggcgcggctacttcgacgaggagatgaaccgcgtcctggcggaccccagcgacgacaccaagggcttctttgaccccaacacgcacgagaacctcacgtacctgcagctactggagcgctgcgtggaggaccccgagacgggcctgtgccttctgccactcacggataaggctgccaagggcggggagctggtctacactgactccgaggcccgggacgtctttgagaaggccaccgtgtctgcgccgttcggcaagttccagggcaagacggtgaccatttgggagatcatcaactcggaatacttcacggcagagcagcggcgggacctgctgcggcagttccgcacgggccggatcacagtggagaagatcatcaagatcatcatcacggtggtggaggagcaggagcagaagggccggctttgctttgagggcctgcgcagcctggtgccagccgccgagctgctggagagcagggtcatcgaccgcgagctctaccagcagctgcagcgaggtgagcgctctgtgcgagacgtagccgaggtggacactgtgcggcgggctctccggggtgccaacgtcatcgcgggtgtatggctggaggaggcggggcagaagctgagtatctacaatgccctgaagaaagacctgctgccatccgacatggccgtggccctgttggaagcccaggccggcaccgggcacatcatcgaccccgccaccagcgcccggctgaccgtggacgaggcagtgcgtgctggcctggtgggccccgagtttcatgagaagctgctatcagccgagaaggctgtgacagggtacagggacccctacacagggcagagcgtctccctgttccaggccctgaagaagggcctcattccccgggagcagggcctgcgcctgttggacgcccagctgtccacgggcggcatcgtggaccccagcaagagccaccgcgtgcccctggatgtcgcctgcgcccgaggctgcctggatgaggagaccagcagggccctgtcggcaccaagggccgacgccaaggcctacagtgaccccagcacaggggagccggccacctacggcgagctccagcagcggtgccggcccgaccagctgaccgggctgagcctgctgccgctctcagaaaaggctgctcgggcccggcaggaggagctctactcagagctgcaggcccgtgagacctttgaaaagaccccggttgaggtccccgtgggtggcttcaagggcaggacggtgacggtgtgggagctcatcagctctgagtacttcactgcggagcagcggcaggagctgttgcgtcagttccgcacgggcaaggtcaccgtggagaaggtcatcaagattctcattaccatcgtggaggaggtggagaccctgcggcaggagaggctgtccttcagcggcctccgtgcccctgtgccagccagcgagctcctggcttccggggtcctcagcagagcccagtttgagcagctcaaggacggcaagacgacggtcaaggacctttcggagctgggctccgtgcggacgctgctgcagggcagtggctgcctcgccggcatctacctggaggacaccaaggagaaggtgtccatctacgaggccatgcgccggggcctgctgagagccacaacggctgcgctcctgctggaggcgcaggcggccactggcttcctggtggaccccgtgcggaaccagcgcctgtatgtccacgaggccgtgaaggcgggcgtggtgggccccgagcttcacgagcagctgctgtctgccgagaaggccgtcaccggctacagagacccctactcgggcagcaccatctccctcttccaggccatgcagaagggcctggttctccggcagcacggcatccgcctgctggaggcccagatcgccacgggcggcatcatcgaccccgtgcacagccaccgcgtgcctgtggacgtggcctaccagcgcggctacttcagtgaggagatgaaccgcgtcctggcggaccccagcgacgacaccaagggcttctttgaccccaacacgcatgagaacctcacgtacaggcagctgctggagcggtgcgtggaggaccccgagacgggcttgcgccttctgccactgaaaggggcggagaaggctgaggtggtggagaccacgcaggtgtacactgaggaggagacaagaagggcatttgaagagacacagatcgacattcccggcggcggcagccacggcggctccaccatgtccctgtgggaggtgatgcagtcggacctgatccccgaggagcagcgggcccagctgatggctgacttccaggccggccgggtgaccaaggaacgcatgatcatcatcatcatcgagatcattgagaagacagagatcatccgccagcagggtctggcctcctacgactacgtgcgccgccgcctcacggctgaggacctgttcgaggctcggatcatctctctcgagacctacaacctgctccgggagggcaccaggagcctccgtgaggctctcgaggcggagtccgcctggtgctacctctatggcacgggctccgtggctggtgtctacctgcccggttccaggcagacactgagcatctaccaggctctcaagaaagggctgctgagtgccgaggtggcccgcctgctgctggaggcacaggcagccacaggcttcctgctggacccggtgaagggggagcggctgactgtggatgaggctgtgcggaagggcctcgtggggcccgagctgcacgaccgcctgctctcggctgagcgggcggtcaccggctaccgtgacccctacaccgagcagaccatctcgctcttccaggccatgaagaaggagctgatccctactgaggaggccctgcggctgctggatgcccagctggccaccggcggcatcgtggacccccgcctgggcttccaccttcccctggaggtggcttaccagcgtggctacctcaacaaggacacgcacgaccagctgtcagagcccagcgaggtgcgcagctacgtggacccgtccaccgacgagcgcctcagctacacgcagctgctcaggcggtgccgtcgtgacgacggcaccggccagctgctcctgccactgtcggacgcccgcaagctgaccttccgtggcctgcggaagcagatcaccatggaggagctggtgcgctcgcaggtcatggacgaggccacggcgctgcagctgcgggagggcctgacctccatcgaggaggtcaccaagaacttgcagaagttcctggaaggcaccagctgcatcgctggtgtcttcgtggacgccaccaaggaacggctctcggtgtaccaggccatgaagaagggcatcatccgccccggcacagcctttgagctcctggaggcgcaggcggccaccggttacgtcatcgaccccatcaagggactgaagctgacggtggaggaggctgtgcgtatgggcattgtgggccccgagttcaaggacaagctgctgtcggccgagcgcgccgtcactgggtacaaggacccctactctgggaagctcatctccctcttccaggccatgaagaagggcctgatcctgaaggaccatggcatccgcctgctggaggcccagatcgccacgggcggcatcatcgaccctgaggagagccaccggctgcccgtggaggtggcctacaagcgcggcctcttcgatgaggagatgaacgagatcctgaccgacccctcggacgacaccaagggcttctttgaccctaacacggaggagaacctcacctacctgcagctgatggagcgttgtatcactgacccccagacgggcctgtgtctcttgccgctgaaggagaagaagcgggagcggaagacgtcctccaagtcctccgtgcgcaagcgccgagtggtcatcgtggaccccgagacgggcaaggagatgtcagtgtacgaggcctaccgcaagggcctgattgaccaccagacgtacctggagctgtccgagcaggagtgcgagtgggaggagatcaccatctcctcctcggacggcgtggtcaagtccatgatcatcgaccgccgctccgggcgccagtacgacatcgatgatgccatcgccaagaacctcatcgaccgctcggcactggaccagtaccgcgccggcacgctctccatcaccgagttcgccgacatgctctcgggcaacgccggtggtttccgctcccgttcctcctcggtgggatcctcctcctcctaccccatcagccccgccgtctccaggacccagctggcctcctggtcagaccccactgaggagacgggccccgtggctggcatcctggacacggagacgctggagaaggtgtccatcaccgaggccatgcaccggaacctggtggataacatcacggggcagcggctgctggaggcgcaggcctgcaccgggggcatcatcgaccccagcaccggtgagcgcttccctgtcaccgacgccgtcaacaagggcctggtggacaagatcatggtggaccgcatcaacctggcccagaaggccttctgcggcttcgaggacccacgcaccaagaccaagatgtcggccgcccaggccctgaagaagggctggctctactacgaggccggccagcgcttcctggaggtgcagtacctgaccggcggcttgatcgagcccgacacgccgggccgcgtgcccctggacgaggccctgcagcgcggcacggtggacgcccgcaccgcacagaagctgcgtgacgtgggcgcctactccaagtacctcacctgccctaagaccaagctcaagatctcctataaggacgcgctggaccgcagcatggtggaggagggcacggggctgcggctgctggaggctgccgcgcagtccaccaagggctactacagcccctacagcgtcagcggctccggctctaccgctggctcccgcaccggctcgcgcaccggctcccgggccggctcccgccgcggcagctttgacgccaccggctccggcttctccatgaccttctcttcatcctcctactcctcctcgggctacggccgccgctacgcctcggggtcctcggcctccctggggggccctgagtctgccgtggcctgaggctgcctgcgcccaccccgctctgcatgcggcccagcccggctcccaccgaggcgcgggggccgttttcaacgcttaaaggtgtcttcctcccaagtggtgcctaaagtttaaccaaaaagaccagactaatatattaatatatatctgctgtccagacagcctgtatcttgggggacagggctggcccagccctgctggccgcctcaccccctcgggtctcctcactcccttctacctgccactcacacagccaggtgccttggagggtcccaagctgggccccagcccaccctcctgtcttcccagggtagcccgcctgccagtcctagctgcacagggcagctgggcccaaccctgtctgtagagggccctggtgtttctagcactggcctgcacggtgggccttgctggggacggggggccccagtcagcctctctcccagtctacccagagaagccccttccccatgggaagacgaggccctcgggcccagcccccacagtgctgtctgatctgtgctttccagctcaccccccacactcactcctgagacccctggccctcctgttgcacccagccctggtctcagcagcgaccacccctgcctccaccctctgagctttgcatgttccactaaccccgggcgggtggcaggtggaggtgtcaggctgctggcgcctctgcaagggcagaacactaacctgaccgtgggcggggccttgcggtatccgcccccaat

SEQ ID NO: 533 - DNA, 276 bp, Homo sapiens
gttctcacaccatccagataatgtatggctgcgacgtggggtcggacgggcgcttcctccgcgggtaccggcaggacgcctacgacggcaaggattacatcgccctgaacgaggacctgcgctcttggaccgcggcggacatggcggctcagatcaccaagcgcaagtgggaggcggcccatgaggcggagcagttgagagcctacctggatgccacgtgcgtggagtggctccgcagatacctggagaacgggaaggagacgctgcagcgcacgg

SEQ ID NO: 534 - DNA, 1826 bp, Homo sapiens
cgcttggcacagaagcagaggggtcagggcgaagtcccagggccccaggcgtggctctcagggtctcaggccccgaaggcggtgtatggattggggagtcccagccttggggattccccaactccgcagtttcttttctccctctcccaacctatgtagggtccttcttcctggatactcacgacgcggacccagttctcactcccattgggtgtcgggtttccagagaagccaatcagtgtcgtcgcggtcgcggttctaaagtccgcacgcacccaccgggactcagattctccccagacgccgaggatggccgtcatggcgccccgaaccctcctcctgctactcttgggggccctggccctgacccagacctgggcgggctcccactccatgaggtatttcaccacatccgtgtcccggcccggccgcggggagccccgcttcatcgccgtgggctacgtggacgacacgcagttcgtgcggtttgacagcgacgccgcgagccagaggatggagccgcgggcaccgtggatagagcaggaggggccggagtattgggacctgcagacacggaatgtgaaggcccagtcacagactgaccgagcgaacctggggaccctgcgcggctactacaaccagagcgaggccggttctcacaccatccagatgatgtatggctgcgacgtggggtcggacgggcgcttcctccgcgggtaccggcaggacgcctacgacggcaaggattacatcgccttgaacgaggacctgcgctcttggaccgcggcggacatggcggctcagatcacccagcgcaagtgggaggcggcccgtgtggcggagcagttgagagcctacctggagggcacgtgcgtggagtggctccgcagatacctggagaacgggaaggagacgctgcagcgcacggacgcccccaaaacgcatatgactcaccacgctgtctctgaccatgaagccaccctgaggtgctgggccctgagcttctaccctgcggagatcacactgacctggcagcgggatggggaggaccagacccaggacacggagctcgtggagaccaggcctgcaggggatggaaccttccagaagtgggcggctgtggtggtgccttctggacaggagcagagatacacctgccatgtgcagcatgagggtttgcccaagcccctcaccctgagatgggagccgtcttcccagcccaccatccccatcgtgggcatcattgctggcctggttctctttggagctgtgatcactggagctgtggtcgctgctgtgaggtggaggaggaagagctcagatagaaaaggagggagctactctcaggctgcaagcagtgacagtgcccagggctctgatgtgtctctcacagcttgtaaagtgtgagacagctgccttgtgtgggactgagaggcaagagttgttcctgcccttccctttgtgacttgaagaaccctgactttgtttctgcaaaggcacctgcatgtgtctgtgttcgtgtaggcataatgtgaggaggtggggagaccaccccacccccatgtccaccatgaccctcttcccacgctgacctgtgctccctccccaatcatctttcctgttccagagaggtggggctgaggtgtctccatctctgtctcaacttcatggtgcactgagctgtaacttcttccttccctattaaaattagaacctgagtataaatttactttctcaaattcttgccatgagaggttgatgagttaattaaaggagaagattcctaaaatttgagagacaaaataaatggaacacatgagaacctt

SEQ ID NO: 535 - DNA, 1567 bp, Homo sapiens
cgcttggcacagaagcagaggggtcagggcgaagtcccagggccccaggcgtggctctcagggtctcaggccccgaaggcggtgtatggattggggagtcccagccttggggattccccaactccgcagtttcttttctccctctcccaacctatgtagggtccttcttcctggatactcacgacgcggacccagttctcactcccattgggtgtcgggtttccagagaagccaatcagtgtcgtcgcggtcgcggttctaaagtccgcacgcacccaccgggactcagattctccccagacgccgaggatggccgtcatggcgccccgaaccctcctcctgctactcttgggggccctggccctgacccagacctgggcgggctcccactccatgaggtatttcaccacatccgtgtcccggcccggccgcggggagccccgcttcatcgccgtgggctacgtggacgacacgcagttcgtgcggtttgacagcgacgccgcgagccagaggatggagccgcgggcaccgtggatagagcaggaggggccggagtattgggacctgcagacacggaatgtgaaggcccagtcacagactgaccgagcgaacctggggaccctgcgcggctactacaaccagagcgaggccggttctcacaccatccagatgatgtatggctgcgacgtggggtcggacgggcgcttcctccgcgggtaccggcaggacgcctacgacggcaaggattacatcgccttgaacgaggacctgcgctcttggaccgcggcggacatggcggctcagatcacccagcgcaagtgggaggcggcccgtgtggcggagcagttgagagcctacctggagggcacgtgcgtggagtggctccgcagatacctggagaacgggaaggagacgctgcagcgcacggacgcccccaaaacgcatatgactcaccacgctgtctctgaccatgaagccaccctgaggtgctgggccctgagcttctaccctgcggagatcacactgacctggcagcgggatggggaggaccagacccaggacacggagctcgtggagaccaggcctgcaggggatggaaccttccagaagtgggcggctgtggtggtgccttctggacaggagcagagatacacctgccatgtgcagcatgagggtttgcccaagcccctcaccctgagatgggagccgtcttcccagcccaccatccccatcgtgggcatcattgctggcctggttctctttggagctgtgatcactggagctgtggtcgctgctgtgaggtggaggaggaagagctcagatagaaaaggagggagctactctcaggctgcaagcagtgacagtgcccagggctctgatgtgtctctcacagcttgtaaagtgtgagacagctgccttgtgtgggactgagaggcaagagttgttcctgcccttccctttgtgacttgaagaaccctgactttgtttctgcaaaggcaccttccaccatgaccctcttcccacgctgacctgtgctccctccccaatcatctttcctgttccagag

SEQ ID NO: 536 - DNA, 1524 bp, Homo sapiens
atgcgggtcatggcgccccgagccctcctcctgctgctctcgggaggcctggccctgaccgagacctgggcctgctcccactccatgaggtatttcgacaccgccgtgtcccggcccggccgcggagagccccgcttcatctcagtgggctacgtggacgacacgcagttcgtgcggttcgacagcgacgccgcgagtccgagaggggagccgcgggcgccgtgggtggagcaggaggggccggagtattgggaccgggagacacagaagtacaagcgccaggcacaggctgaccgagtgagcctgcggaacctgcgcggctactacaaccagagcgaggacgggtctcacaccctccagaggatgtatggctgcgacctggggcccgacgggcgcctcctccgcgggtatgaccagtccgcctacgacggcaaggattacatcgccctgaacgaggacctgcgctcctggaccgccgcggacacggcggctcagatcacccagcgcaagtgggaggcggcccgtgaggcggagcagtggagagcctacctggagggcacgtgcgtggagtggctccgcagatacctggagaacgggaaggagacgctgcagcgcgcggaacacccaaagacacacgtgacccaccatcccgtctctgaccatgaggccaccctgaggtgctgggccctgggcttctaccctgcggagatcacactgacctggcagcgggatggcgaggaccaaactcaggacaccgagcttgtggagaccaggccagcaggagatggaaccttccagaagtgggcagctgtggtggtgccttctggagaagagcagagatacacgtgccatatgcagcacgaggggctgccagagcccctcaccctgagctgggagccatcttcccagcccaccatccccatcatgggcatcgttgctggcctggctgtcctggctgtcctagctgtcctaggagctgtgatggctgttgtgatgtgtaggaggaagagctcaggtggaaaaggagggagctgctctcaggctgcgtgcagcaacagtgcccagggctctgatgagtctctcatcacttgtaaagcctgagacagctgcctgtgtgggactgagatgcaggatttcttcacacctctcctttgtgacttcaagagcctctggcatctctttctgcaaaggcatctgaatgtgtctgcgttcctgttagcataatgtgaggaggtggagagacagcccacccccgtgtccaccgtgacccctgtccccacactgacctgtgttccctccccgatcatctttcctgttccagagaagtgggctggatgtctccatctctgtctcaactttacgtgtactgagctgcaacttcttacttccctactgaaaataagaatctgaatataaatttgttttctcaaatatttgctatgagaggttgatggattaattaaataagtcaattcctggaagttgagagagcaaataaagacctgagaaccttccagaatccgc

SEQ ID NO: 537 - DNA, 1578 bp, Homo sapiens
ggttctaaagtccccagtcacccacccggactcacattctccccagaggccgagatgcgggtcatggcgccccgagccctcctcctgctgctctcgggaggcctggccctgaccgagacctgggcctgctcccactccatgaggtatttcgacaccgccgtgtcccggcccggccgcggagagccccgcttcatctcagtgggctacgtggacgacacgcagttcgtgcggttcgacagcgacgccgcgagtccgagaggggagccgcgggcgccgtgggtggagcaggaggggccggagtattgggaccgggagacacagaagtacaagcgccaggcacaggctgaccgagtgagcctgcggaacctgcgcggctactacaaccagagcgaggacgggtctcacaccctccagaggatgtatggctgcgacctggggcccgacgggcgcctcctccgcgggtatgaccagtccgcctacgacggcaaggattacatcgccctgaacgaggacctgcgctcctggaccgccgcggacacggcggctcagatcacccagcgcaagtgggaggcggcccgtgaggcggagcagtggagagcctacctggagggcacgtgcgtggagtggctccgcagatacctggagaacgggaaggagacgctgcagcgcgcggaacacccaaagacacacgtgacccaccatcccgtctctgaccatgaggccaccctgaggtgctgggccctgggcttctaccctgcggagatcacactgacctggcagcgggatggcgaggaccaaactcaggacaccgagcttgtggagaccaggccagcaggagatggaaccttccagaagtgggcagctgtggtggtgccttctggagaagagcagagatacacgtgccatatgcagcacgaggggctgccagagcccctcaccctgagctgggagccatcttcccagcccaccatccccatcatgggcatcgttgctggcctggctgtcctggctgtcctagctgtcctaggagctgtgatggctgttgtgatgtgtaggaggaagagctcaggtggaaaaggagggagctgctctcaggctgcgtgcagcaacagtgcccagggctctgatgagtctctcatcacttgtaaagcctgagacagctgcctgtgtgggactgagatgcaggatttcttcacacctctcctttgtgacttcaagagcctctggcatctctttctgcaaaggcatctgaatgtgtctgcgttcctgttagcataatgtgaggaggtggagagacagcccacccccgtgtccaccgtgacccctgtccccacactgacctgtgttccctccccgatcatctttcctgttccagagaagtgggctggatgtctccatctctgtctcaactttacgtgtactgagctgcaacttcttacttccctactgaaaataagaatctgaatataaatttgttttctcaaatatttgctatgagaggttgatggattaattaaataagtcaattcctggaagttgagagagcaaataaagacctgagaaccttccagaatccgc

SEQ ID NO: 538 - DNA, 1591 bp, Homo sapiens
gtcgccggggtcccagttctaaagtccccacgcacccacccggactcagagtctcctcagacgccgagatgctggtcatggcgccccgaaccgtcctcctgctgctctcggcggccctggccctgaccgagacctgggccggctcccactccatgaggtatttctacaccgccatgtcccggcccggccgcggggagccccgcttcatctcagtgggctacgtggacgacacccagttcgtgaggttcgacagcgacgccgcgagtccgagagaggagccgcgggcgccgtggatagagcaggaggggccggagtattgggaccggaacacacagatcttcaagaccaacacacagactgaccgagagagcctgcggaacctgcgcggctactacaaccagagcgaggccgggtctcacaccctccagagcatgtacggctgcgacgtggggccggacgggcgcctcctccgcgggcataaccagtacgcctacgacggcaaggattacatcgccctgaacgaggacctgcgctcctggaccgcggcggacaccgcggctcagatcacccagcgcaagtgggaggcggcccgtgtggcggagcaggagagagcctacctggagggcacgtgcgtggagtggctccgcagatacctggagaacgggaaggacacgctggagcgcgcggaccccccaaagacacacgtgacccaccaccccatctctgaccatgaggccaccctgaggtgctgggccctgggcttctaccctgcggagatcacactgacctggcagcgggatggcgaggaccaaactcaggacactgagcttgtggagaccagaccagcaggagatagaaccttccagaagtgggcagctgtggtggtgccttctggagaagagcagagatacacatgccatgtacagcatgaggggctgccgaagcccctcaccctgagatgggagccgtcttcccagtccaccgtccccatcgtgggcattgttgctggcctggctgtcctagcagttgtggtcatcggagctgtggtcgctgctgtgatgtgtaggaggaagagctcaggtggaaaaggagggagctactctcaggctgcgtgcagcgacagtgcccagggctctgatgtgtctctcacagcttgaaaagcctgagacagctgtcttgtgagggactgagatgcaggatttcttcacgcctcccctttgtgacttcaagagcctctggcatctctttctgcaaaggcacctgaatgtgtctgcgtccctgttagcataatgtgaggaggtggagagacagcccacccttgtgtccactgtgacccctgttcccatgctgacctgtgtttcctccccagtcatctttcttgttccagagaggtggggctggatgtctccatctctgtctcaactttatgtgcactgagctgcaacttcttacttccctactgaaaataagaatctgaatataaatttgttttctcaaatatttgctatgagaggttgatggattaattaaataagtcaattcctggaatttgagagagcaaataaagacctgagaaccttccagaatctgc

SEQ ID NO: 539 - DNA, 1536 bp, Homo sapiens
gtcgccggggtcccagttctaaagtccccacgcacccacccggactcagagtctcctcagacgccgagatgctggtcatggcgccccgaaccgtcctcctgctgctctcggcggccctggccctgaccgagacctgggccggctcccactccatgaggtatttctacaccgccatgtcccggcccggccgcggggagccccgcttcatctcagtgggctacgtggacgacacccagttcgtgaggttcgacagcgacgccgcgagtccgagagaggagccgcgggcgccgtggatagagcaggaggggccggagtattgggaccggaacacacagatcttcaagaccaacacacagactgaccgagagagcctgcggaacctgcgcggctactacaaccagagcgaggccgggtctcacaccctccagagcatgtacggctgcgacgtggggccggacgggcgcctcctccgcgggcataaccagtacgcctacgacggcaaggattacatcgccctgaacgaggacctgcgctcctggaccgcggcggacaccgcggctcagatcacccagcgcaagtgggaggcggcccgtgtggcggagcaggagagagcctacctggagggcacgtgcgtggagtggctccgcagatacctggagaacgggaaggacacgctggagcgcgcggaccccccaaagacacacgtgacccaccaccccatctctgaccatgaggccaccctgaggtgctgggccctgggcttctaccctgcggagatcacactgacctggcagcgggatggcgaggaccaaactcaggacactgagcttgtggagaccagaccagcaggagatagaaccttccagaagtgggcagctgtggtggtgccttctggagaagagcagagatacacatgccatgtacagcatgaggggctgccgaagcccctcaccctgagatgggagccgtcttcccagtccaccgtccccatcgtgggcattgttgctggcctggctgtcctagcagttgtggtcatcggagctgtggtcgctgctgtgatgtgtaggaggaagagctcaggtggaaaaggagggagctactctcaggctgcgtgcagcgacagtgcccagggctctgatgtgtctctcacagcttgaaaagcctgagacagctgtcttgtgagggactgagatgcaggatttcttcacgcctcccctttgtgacttcaagagcctctggcatctctttctgcaaaggcacctgaatgtgtctgcgtccctgttagcataatgtgaggaggtggagagacagcccacccttgtgtccactgtgacccctgttcccatgctgacctgtgtttcctccccagtcatctttcttgttccagagaggtggggctggatgtctccatctctgtctcaactttatgtgcactgagctgcaacttcttacttccctaagaggttgatggattaattaaataagtcaattcctggaatttgagagagcaaataaagacctgagaaccttccagaa

SEQ ID NO: 540 - DNA, 2543 bp, Homo sapiens
acgccgagatgcgggtcacggcgccccgaaccctcctcctgctgctctggggggcagtggccctgaccgagacctgggccggtgagtgcgggatcgggagggaaatggcctctgtggggaggagcgaggggaccgcaggcgggggcgcaggacccggggagccgcgccgggaggagggtctggcgggtctcagcccctcctggcccccaggctcccactccatgaggtatttctacaccgccatgtcccggcccggccgcggggagccccgcttcatcaccgtgggctacgtggacgacacccagttcgtgaggttcgacagcgacgccacgagtccgaggatggcgccccgggcgccatggatagagcaggaggggccggagtattgggaccgggagacacagatctccaagaccaacacacagacttaccgagagaacctgcgcaccgcgctccgctactacaaccagagcgaggccgggtctcacatcatccagaggatgtacggctgcgacgtggggccggacgggcgcctcctccgcgggtatgaccaggacgcctacgacggcaaggattacatcgccctgaacgaggacctgagctcctggaccgcggcggacaccgcggctcagatcacccagcgcaagtgggaggcggcccgtgtggcggagcagctgagagcctacctggagggcctgtgcgtggagtggctccgcagatacctggagaacgggaaggagacgctgcagcgcgcgggtaccaggggcagtggggagccttccccatctcctatagacgccgagatgctggtcatggcgccccgaaccgtcctcctgctgctctcggcggccctggccctgaccgagacctgggccgaccccccaaagacacacgtgacccaccaccccatctctgaccatgaggccaccctgaggtgctgggccctgggcttctaccctgcggagatcacactgacctggcagcgggatggcgaggaccaaactcaggacactgagcttatgcgggtcatggcgccccgagccctcctcctgctgctctcgggaggcctggccctgaccgagacctgggcctgctcccactccatgaggtatttcgacaccgccgtgtcccggcccggccgcggagagccccgcttcatctcagtgggctacgtggacgacacgcagttcgtgcggttcgacagcgacgccgcgagtccgagaggggagccgcgggcgccgtgggtggagcaggaggggccggagtattgggaccgggagacacagaagtacaagcgccaggcacaggctgaccgagtgagcctgcggaacctgcgcggctactacaaccagagcgaggacgggtctcacaccctccagaggatgtatggctgcgacctggggcccgacgggcgcctcctccgcgggtatgaccagtccgcctacgacggcaaggattacatcgccctgaacgaggacctgcgctcctggaccgccgcggacacggcggctcagatcacccagcgcaagtgggaggcggcccgtgaggcggagcagtggagagcctacctggagggcacgtgcgtggagtggctccgcagatacctggagaacgggaaggagacgctgcagcgcgcggaacacccaaagacacacgtgacccaccatcccgtctctgaccatgaggccaccctgaggtgctgggccctgggcttctaccctgcggagatcacactgacctggcagcgggatggcgaggaccaaactcaggacaccgagcttgtggagaccaggccagcaggagatggaaccttccagaagtgggcagctgtggtggtgccttctggagaagagcagagatacacgtgccatatgcagcacgaggggctgccagagcccctcaccctgagctgggagccatcttcccagcccaccatccccatcatgggcatcgttgctggcctggctgtcctggctgtcctagctgtcctaggagctgtgatggctgttgtgatgtgtaggaggaagagctcaggtggaaaaggagggagctgctctcaggctgcgtgcagcaacagtgcccagggctctgatgagtctctcatcacttgtaaagcctgagacagctgcctgtgtgggactgagatgcaggatttcttcacacctctcctttgtgacttcaagagcctctggcatctctttctgcaaaggcatctgaatgtgtctgcgttcctgttagcataatgtgaggaggtggagagacagcccacccccgtgtccaccgtgacccctgtccccacactgacctgtgttccctccccgatcatctttcctgttccagagaagtgggctggatgtctccatctctgtctcaactttacgtgtactgagctgcaacttcttacttccctactgaaaataagaatctgaatataaatttgttttctcaaatatttgctatgagaggttgatggattaattaaataagtcaattcctggaagttgagagagcaaataaagacctgagaaccttccagaatccgc

SEQ ID NO: 541 - DNA, 1587 bp, Homo sapiens
gtcgccggggtcccagttctaaagtccccacgcacccacccggactcagagtctcctcagacgccgagatgctggtcatggcgccccgaaccgtcctcctgctgctctcggcggccctggccctgaccgagacctgggccggctcccactccatgaggtatttctacaccgccatgtcccggcccggccgcggggagccccgcttcatctcagtgggctacgtggacgacacccagttcgtgaggttcgacagcgacgccgcgagtccgagagaggagccgcgggcgccgtggatagagcaggaggggccggagtattgggaccggaacacacagatcttcaagaccaacacacagactgaccgagagagcctgcggaacctgcgcggctactacaaccagagcgaggccgggtctcacaccctccagagcatgtacggctgcgacgtggggccggacgggcgcctcctccgcgggcataaccagtacgcctacgacggcaaggattacatcgccctgaacgaggacctgcgctcctggaccgcggcggacaccgcggctcagatcacccagcgcaagtgggaggcggcccgtgtggcggagcaggagagagcctacctggagggcacgtgcgtggagtggctccgcagatacctggagaacgggaaggacacgctggagcgcgcggaccccccaaagacacacgtgacccaccaccccatctctgaccatgaggccaccctgaggtgctgggccctgggcttctaccctgcggagatcacactgacctggcagcgggatggcgaggaccaaactcaggacactgagcttgtggagaccagaccagcaggagatagaaccttccagaagtgggcagctgtggtggtgccttctggagaagagcagagatacacatgccatgtacagcatgaggggctgccgaagcccctcaccctgagatgggccgtcttcccagtccaccgtccccatcgtgggcattgttgctggcctggctgtcctagcagttgtggtcatcggagctgtggtcgctgctgtgatgtgtaggaggaagagctcaggtggaaaaggagggagctgctctcaggctgcgtgcagcaacagtgcccagggctctgatgagtctctcatcacttgtaaagcctgagacagctgcctgtgtgggactgagatgcaggatttcttcacacctctcctttgtgacttcaagagcctctggcatctctttctgcaaaggcatctgaatgtgtctgcgttcctgttagcataatgtgaggaggtggagagacagcccacccccgtgtccaccgtgacccctgtccccacactgacctgtgttccctccccgatcatctttcctgttccagagaagtgggctggatgtctccatctctgtctcaactttacgtgtactgagctgcaacttcttacttccctactgaaaataagaatctgaatataaatttgttttctcaaatatttgctatgagaggttgatggattaattaaataagtcaattcctggaagttgagagagcaaataaagacctgagaaccttccagaatccgc

SEQ ID NO: 542 - DNA, 1089 bp, Homo sapiens
atgctggtcatggcgccccgaaccgtcctcctgctgctctcggcggccctggccctgaccgagacctgggccggctcccactccatgaggtatttctacacctccgtgtcccggcccggccgcggggagccccgcttcatctcagtgggctacgtggacgacacgcagttcgtgaggttcgacagcgacgccgcgagtccgagagaggagccgcgggcgccgtggatagagcaggaggggccggaatattgggaccgggagacacagatctccaagaccaacacacagactgaccgagagagcctgcggaacctgcgcggctactacaaccagagcgaggccgggtctcacaccctccagaggatgtacggctgcgacgtggggccggacgggcgcctcctccgcgggcataaccagttcgcctacgacggcaaggattacatcgccctgaacgaggacctgagctcctggaccgcggcggacaccgcggctcagatcacccagcgcaagtgggaggcggcccgtgtggcggagcagctgagaacctacctggagggcacgtgcgtggagtggctccgcagatacctggagaacgggaaggagacgctgcagcgcgcggaccccccaaagacacatgtgacccaccaccccatctctgaccatgaggccaccctgaggtgctgggccctgggcttctaccctgcggagatcacactgacctggcagcgggatggcgaggaccaaactcaggacaccgagcttgtggagaccagaccagcaggagacagaaccttccagaagtgggcagctgtggtggtgccttctggagaagagcagagatacacatgccatgtacagcatgaggggctgccgaagcccctcaccctgagatgggagccatcttcccagtccaccgtccccatcgtgggcattgttgctggcctggctgtcctagcagttgtggtcatcggagctgtggtcgctgctgtgatgtgtaggaggaagagctcaggtggaaaaggagggagctactctcaggctgcgtccagcgacagtgcccagggctctgatgtgtctctcacagcttga

SEQ ID NO: 543 - DNA, 1089 bp, Homo sapiens
atgctggtcatggcgccccgaaccgtcctcctgctgctctcggcggccctggccctgaccgagacctgggccggctcccactccatgaggtatttctacacctccgtgtcccggcccggccgcggggagccccgcttcatctcagtgggctacgtggacgacacgcagttcgtgaggttcgacagcgacgccgcgagtccgagagaggagccgcgggcgccgtggatagagcaggaggggccggaatattgggaccggaacacacagatctgcaagaccaacacacagactgaccgagagagcctgcggaacctgcgcggctactacaaccagagcgaggccgggtctcacaccctccagaggatgtacggctgcgacgtggggccggacgggcgcctcctccgcgggcataaccagttcgcctacgacggcaaggattacatcgccctgaacgaggacctgagctcctggaccgcggcggacaccgcggctcagatcacccagcgcaagtgggaggcggcccgtgtggcggagcagctgagaacctacctggagggcacgtgcgtggagtggctccgcagatacctggagaacgggaaggagacgctgcagcgcgcggaccccccaaagacacatgtgacccaccaccccatctctgaccatgaggccaccctgaggtgctgggccctgggcttctaccctgcggagatcacactgacctggcagcgggatggcgaggaccaaactcaggacaccgagcttgtggagaccagaccagcaggagacagaaccttccagaagtgggcagctgtggtggtgccttctggagaagagcagagatacacatgccatgtacagcatgaggggctgccgaagcccctcaccctgagatgggagccatcttcccagtccaccgtccccatcgtgggcattgttgctggcctggctgtcctagcagttgtggtcatcggagctgtggtcgctgctgtgatgtgtaggaggaagagttcaggtggaaaaggagggagctactctcaggctgcgtccagcgacagtgcccagggctctgatgtgtctctcacagcttga

SEQ ID NO: 544 - DNA, 2437 bp, Homo sapiens
cacgcggcaggcggtggcgggattctgccgcgtgcgctttcccgccccgcctcgcctagcctcgtcctgcgctcgccacgcctcgggctgtccgttgggccacgcagaccgcgctgcgctcgctccgtcgcggctccgcgtgccccaccttctggctagttttttctagagcccaggctccgcccgtttcccgcttccagggcccggttcgttcccgcccgcacccgtccctctcctctgcacccctgctgcttctgctttgaaggcggaggctccatgttgtcccctcagcgagtggcagcagctgcctcaagaggagcagatgatgccatggagagcagcaagcctggtccagtgcaggttgttttggttcagaaagatcaacattcctttgagctagatgagaaagccttggccagcatcctcttgcaggaccacatccgagatcttgatgtggtggtggtttcagtggctggtgccttccgaaagggcaagtccttcattctggattttatgctacgatacttatattctcagaaggaaagtggccattcaaattggttgggtgacccagaagaaccgttaacaggattttcctggagagggggatctgatccagaaaccactgggattcaaatctggagtgaagttttcactgtggagaagccaggtgggaagaaggttgcagttgttctgatggatacccagggggcatttgacagccagtcaactgtgaaagactgtgctaccatctttgctctaagcactatgactagttctgttcagatttataatttatctcagaacattcaagaagatgatcttcaacagctgcagctcttcacagaatacggtcgtctggcaatggatgaaattttccaaaagcctttccagacactgatgtttttggttagagattggagtttcccttatgaatatagctatggactccaaggaggaatggcatttttggataagcgtttacaggtgaaggaacatcaacatgaagaaattcagaatgttcgaaatcacattcactcatgtttctccgatgtcacctgctttctcttaccacatccaggactccaggtggccacaagccctgactttgatgggaaattaaaagatattgctggtgaattcaaagagcagttacaggcactgataccgtatgtattaaacccatctaagttaatggaaaaggagatcaatggctcaaaggtcacctgtcggggactactggagtattttaaggcatatattaaaatttatcaaggagaagatctgcctcaccccaagtccatgcttcaggccactgctgaagccaacaacttagcagctgcagcctctgccaaggacatttattataacaacatggaagaggtttgtgggggagagaaaccttatttgtctccagacattctagaggagaagcactgtgaattcaaacaacttgctctggaccattttaagaagaccaagaagatgggtgggaaggatttcagctttcgttaccagcaggagctggaggaggaaatcaaggaattatatgagaacttctgcaagcacaatggtagcaagaacgtcttcagcaccttccgaacccctgcagtgctgttcacgggcattgtagctttgtacatagcctcaggcctcactggcttcataggtcttgaggttgtagcccagttgttcaactgtatggttggactactgttaatagcactcctcacctggggctacatcaggtattctggtcaatatcgtgagctgggcggagctattgattttggtgccgcatatgtgttggagcaggcttcttctcatatcggtaattccactcaggccactgtgagggatgcagttgttggaagaccatccatggataaaaaagctcaatagcatcttaacgtgaagatcaaacaagaacacaacaagcccctactgatttctgggtttctgccacggccacaggttcatatccagaggaatggcagatctgagacgatccaggaagagctaaaacatggccctgtaataaatgagcagacctctcctgtggtttcaaattattaaacacacttccatttctcttggaagcatttcttttccttgctgttatagatgcaagcctgtgtctattttcatattactctgctttgtgcactttatggaggaggaagctagaggaaaaatggaaatgcagcttttaagttctttatgtgccacttagtgccttttaagattgattccatggttttgcacacacgatggggaggggatggaggataacctcatgaaaggtgccgttttcgggtgaaacttgacatttcttttatactttactcttttgagaaggattctttttttttttttttttttttttgagttggagtctcgctctgtcaccaggcttgagtgcagtggtgtgatcttg

SEQ ID NO: 545 - DNA, 1777 bp, Homo sapiens
aggcctagttaaacaccaaagctgtctctcacactggtggttccaggataaagcctcggcctggggcctggtctgcacgttaggcgccggccgcagctcgcaggaggacccgagccagcccgccccttcccgcacagcctgctgggagttgtagttcagtcgtcggagaaccacgccaagccccgccccagatgagtgcgcagtatgaggaccgctggccgggacccagtgagcgcgggactacaattcccaaaggacggtagcactcagcgccccgccaacagatgatgccatggagagcagcaagcctggtccagtgcaggttgttttggttcagaaagatcaacattcctttgagctagatgagaaagccttggccagcatcctcttgcaggaccacatccgagatcttgatgtggtggtggtttcagtggctggtgccttccgaaagggcaagtccttcattctggattttatgctacgatacttatattctcagaaggaaagtggccattcaaattggttgggtgacccagaagaaccgttaacaggattttcctggagagggggatctgatccagaaaccactgggattcaaatctggagtgaagttttcactgtggagaagccaggtgggaagaaggttgcagttgttctgatggatacccagggggcatttgacagccagtcaactgtgaaagactgtgctaccatctttgctctaagcactatgactagttctgttcagatttataatttatctcagaacattcaagaagatgatcttcaacagctgcagctcttcacagaatacggtcgtctggcaatggatgaaattttccaaaagcctttccagacactgatgtttttggttagagattggagtttcccttatgaatatagctatggactccaaggaggaatggcatttttggataagcgtttacaggtgaaggaacatcaacatgaagaaattcagaatgttcgaaatcacattcactcatgtttctccgatgtcacctgctttctcttaccacatccaggactccaggtggccacaagccctgactttgatgggaaattaaaagatattgctggtgaattcaaagagcagttacaggcactgataccgtatgtattaaacccatctaagttaatggaaaaggagatcaatggctcaaaggtcacctgtcggggactactggagtattttaaggcatatattaaaatttatcaaggagaagatctgcctcaccccaagtccatgcttcaggccactgctgaagccaacaacttagcagctgcagcctctgccaaggacatttattataacaacatggaagaggtttgtgggggagagaaaccttatttgtctccagacattctagaggagaagcactgtgaattcaaacaacttgctctggaccattttaagaagaccaagaagatgggtgggaaggatttcagctttcgttaccagcaggagctggaggaggaaatcaaggaattatatgagaacttctgcaagcacaatggtagcaagaacgtcttcagcaccttccgaacccctgcagtgctgttcacgggcattgtagctttgtacatagcctcaggcctcactggcttcataggtcttgaggttgtagcccagttgttcaactgtatggttggactactgttaatagcactcctcacctggggctacatcaggtattctggtcaatatcgtgagctgggcggagctattgattttggtgccgcatatgtgttggagcag

SEQ ID NO: 546 - DNA, 3442 bp, Homo sapiens
gagaagactggagaaagaatagagggctgagaccagaggtgaagcgggagggacaagaaagatgacaaggactcacccaagaagaacaagggcaaggagcgccgggacctggatgacctcaagaaggaggtggctatgacagagcacaagatgtcagtggaagaggtctgccggaaatacaacacagactgtgtgcagggtttgacccacagcaaagcccaggagatcctggcccgggatgggcctaacgcactcacgccaccgcctaccaccccagagtgggtcaagttttgccggcagctcttcgggggcttctccatcctgctgtggatcggggctatcctctgcttcctggcctacggtatccaggcgggcaccgaggacgacccctctggtgacaacctgtacctgggcatcgtgctggcggccgtggtgatcatcactggctgcttctcctactaccaggaggccaagagctccaagatcatggagtccttcaagaacatggtgccccagcaagccctggtgatccgggaaggtgagaagatgcaggtgaacgctgaggaggtggtggtcggggacctggtggagatcaagggtggagaccgagtgccagctgacctgcggatcatctcagcccacggctgcaaggtggacaactcctccctgactggcgaatccgagccccagactcgctctcccgactgcacgcacgacaaccccttggagactcggaacatcaccttcttttccaccaactgtgtggaaggcacggctcggggcgtggtggtggccacgggcgaccgcactgtcatgggccgtatcgccaccctggcatcagggctggaggtgggcaagacgcccatcgccatcgagattgagcacttcatccagctcatcaccggcgtggctgtcttcctgggtgtctccttcttcatcctctccctcattctcggatacacctggcttgaggctgtcatcttcctcatcggcatcatcgtggccaatgtcccagagggtctgctggccactgtcactgtgtgtctgacgctgaccgccaagcgcatggcccggaagaactgcctggtgaagaacctggaggctgtagaaaccctgggctccacgtccaccatctgctcagataagacagggaccctcactcagaaccgcatgacagtcgcccacatgtggtttgacaaccagatccacgaggctgacaccactgaggaccagtcagggacctcatttgacaagagttcgcacacctgggtggccctgtctcacatcgctgggctctgcaatcgcgctgtcttcaagggtggtcaggacaacatccctgtgctcaagagggatgtggctggggatgcgtctgagtctgccctgctcaagtgcatcgagctgtcctctggctccgtgaagctgatgcgtgaacgcaacaagaaagtggctgagattcccttcaattccaccaacaaataccagctctccatccatgagaccgaggaccccaacgacaaccgatacctgctggtgatgaagggtgcccccgagcgcatcctggaccgctgctccaccatcctgctacagggcaaggagcagcctctggacgaggaaatgaaggaggccttccagaatgcctaccttgagctcggtggcctgggcgagcgcgtgcttggtttctgccattattacctgcccgaggagcagttccccaagggctttgccttcgactgtgatgacgtgaacttcaccacggacaacctctgctttgtgggcctcatgtccatgatcgacccaccccgggcagccgtccctgacgcggtgggcaagtgtcgcagcgcaggcatcaaggtcatcatggtcaccggcgatcaccccatcacggccaaggccattgccaagggtgtgggcatcatctctgagggcaacgagactgtggaggacatcgccgcccggctcaacattcccgtcagccaggttaacccccgggatgccaaggcctgcgtgatccacggcaccgacctcaaggacttcacctccgagcaaatcgacgagatcctgcagaatcacaccgagatcgtcttcgcccgcacatccccccagcagaagctcatcattgtggagggctgtcagagacagggtgcaattgtggctgtgaccggggatggtgtgaacgactcccccgctctgaagaaggccgacattggggtggccatgggcatcgctggctctgacgtctccaagcaggcagctgacatgatcctgctggacgacaactttgcctccatcgtcacaggggtggaggagggccgcctgatcttcgacaacctaaagaagtccattgcctacaccctgaccagcaatatcccggagatcacgcccttcctgctgttcatcatggccaacatcccgctgcccctgggcaccatcaccatcctctgcatcgatctgggcactgacatggtccctgccatctcactggcgtacgaggctgccgaaagcgacatcatgaagagacagcccaggaacccgcggacggacaaattggtcaatgagagactcatcagcatggcctacgggcagattggaatgatccaggctctcggtggcttcttctcttactttgtgatcctggcagaaaatggcttcttgcccggcaacctggtgggcatccggctgaactgggatgaccgcaccgtcaatgacctggaagacagttacgggcagcagtggacatacgagcagaggaaggtggtggagttcacctgccacacggccttctttgtgagcatcgttgtcgtccagtgggccgatctgatcatctgcaagacccggaggaactcggtcttccagcagggcatgaagaacaagatcctgatcttcgggctgtttgaggagacggccctggctgccttcctgtcctactgccccggcatggacgtggccctgcgcatgtaccctctcaagcccagctggtggttctgtgccttcccctacagtttcctcatcttcgtctacgacgaaatccgcaaactcatcctgcgcaggaacccagggggttgggtggagaaggaaacctactactgacctcagccccaccacatcgcccatctcttccccgtcccgcaggcccaggaccgcccctgtcagtccccccaattttgtattctggggggaggagccctctcttcctgtggccccaccttggcccccaccccctccactatctcctgccgcccccactctggctggcttctctcccctgccccaaacctctctcctctctcttttctgtgtcagtttctctccctctcctcacccctctatccattcctcccgccccagccacctccctgggctcttttttactccccttcagccccccggctgatgccatctctggttctggacaattatcaaatatatcagtggggagagagaa

SEQ ID NO: 547 - DNA, 3391 bp, Homo sapiens
gacaagaaagatgacaaggactcacccaagaagaacaagggcaaggagcgccgggacctggatgacctcaagaaggaggtggctatgacagagcacaagatgtcagtggaagaggtctgccggaaatacaacacagactgtgtgcagggtttgacccacagcaaagcccaggagatcctggcccgggatgggcctaacgcactcacgccaccgcctaccaccccagagtgggtcaagttttgccggcagctcttcgggggcttctccatcctgctgtggatcggggctatcctctgcttcctggcctacggtatccaggcgggcaccgaggacgacccctctggtgacaacctgtacctgggcatcgtgctggcggccgtggtgatcatcactggctgcttctcctactaccaggaggccaagagctccaagatcatggagtccttcaagaacatggtgccccagcaagccctggtgatccgggaaggtgagaagatgcaggtgaacgctgaggaggtggtggtcggggacctggtggagatcaagggtggagaccgagtgccagctgacctgcggatcatctcagcccacggctgcaaggtggacaactcctccctgactggcgaatccgagccccagactcgctctcccgactgcacgcacgacaaccccttggagactcggaacatcaccttcttttccaccaactgtgtggaaggcacggctcggggcgtggtggtggccacgggcgaccgcactgtcatgggccgtatcgccaccctggcatcagggctggaggtgggcaagacgcccatcgccatcgagattgagcacttcatccagctcatcaccggcgtggctgtcttcctgggtgtctccttcttcatcctctccctcattctcggatacacctggcttgaggctgtcatcttcctcatcggcatcatcgtggccaatgtcccagagggtctgctggccactgtcactgtgtgtctgacgctgaccgccaagcgcatggcccggaagaactgcctggtgaagaacctggaggctgtagaaaccctgggctccacgtccaccatctgctcagataagacagggaccctcactcagaaccgcatgacagtcgcccacatgtggtttgacaaccagatccacgaggctgacaccactgaggaccagtcagggacctcatttgacaagagttcgcacacctgggtggccctgtctcacatcgctgggctctgcaatcgcgctgtcttcaagggtggtcaggacaacatccctgtgctcaagagggatgtggctggggatgcgtctgagtctgccctgctcaagtgcatcgagctgtcctctggctccgtgaagctgatgcgtgaacgcaacaagaaagtggctgagattcccttcaattccaccaacaaataccagctctccatccatgagaccgaggaccccaacgacaaccgatacctgctggtgatgaagggtgcccccgagcgcatcctggaccgctgctccaccatcctgctacagggcaaggagcagcctctggacgaggaaatgaaggaggccttccagaatgcctaccttgagctcggtggcctgggcgagcgcgtgcttggtttctgccattattacctgcccgaggagcagttccccaagggctttgccttcgactgtgatgacgtgaacttcaccacggacaacctctgctttgtgggcctcatgtccatgatcgacccaccccgggcagccgtccctgacgcggtgggcaagtgtcgcagcgcaggcatcaaggtcatcatggtcaccggcgatcaccccatcacggccaaggccattgccaagggtgtgggcatcatctctgagggcaacgagactgtggaggacatcgccgcccggctcaacattcccgtcagccaggttaacccccgggatgccaaggcctgcgtgatccacggcaccgacctcaaggacttcacctccgagcaaatcgacgagatcctgcagaatcacaccgagatcgtcttcgcccgcacatccccccagcagaagctcatcattgtggagggctgtcagagacagggtgcaattgtggctgtgaccggggatggtgtgaacgactcccccgctctgaagaaggccgacattggggtggccatgggcatcgctggctctgacgtctccaagcaggcagctgacatgatcctgctggacgacaactttgcctccatcgtcacaggggtggaggagggccgcctgatcttcgacaacctaaagaagtccattgcctacaccctgaccagcaatatcccggagatcacgcccttcctgctgttcatcatggccaacatcccgctgcccctgggcaccatcaccatcctctgcatcgatctgggcactgacatggtccctgccatctcactggcgtacgaggctgccgaaagcgacatcatgaagagacagcccaggaacccgcggacggacaaattggtcaatgagagactcatcagcatggcctacgggcagattggaatgatccaggctctcggtggcttcttctcttactttgtgatcctggcagaaaatggcttcttgcccggcaacctggtgggcatccggctgaactgggatgaccgcaccgtcaatgacctggaagacagttacgggcagcagtggacatacgagcagaggaaggtggtggagttcacctgccacacggccttctttgtgagcatcgttgtcgtccagtgggccgatctgatcatctgcaagacccggaggaactcggtcttccagcagggcatgaagaacaagatcctgatcttcgggctgtttgaggagacggccctggctgccttcctgtcctactgccccggcatggacgtggccctgcgcatgtaccctctcaagcccagctggtggttctgtgccttcccctacagtttcctcatcttcgtctacgacgaaatccgcaaactcatcctgcgcaggaacccagggggttgggtggagaaggaaacctactactgacctcagccccaccacatcgcccatctcttccccgtcccgcaggcccaggaccgcccctgtcagtccccccaattttgtattctggggggaggagccctctcttcctgtggccccaccttggcccccaccccctccactatctcctgccgcccccactctggctggcttctctcccctgccccaaacctctctcctctctcttttctgtgtcagtttctctccctctcctcacccctctatccattcctcccgccccagccacctccctgggctcttttttactccccttcagccccccggctgatgccatctctggttctggacaattatcaaatatatcagtggggagagagaa

SEQ ID NO: 548 - DNA, 3558 bp, Homo sapiens
ccgccgcagcctctgtgcggtgggaccaacggacggacggacggacgcgcgcacctaccgaggcgcgggcgctgcagaggctcccagcccaagcctgagcctgagcccgccccgaggtccccgccccgcccgcctggctctctcgccgcggagccgccaagatgggggacaagaaagatgacaaggactcacccaagaagaacaagggcaaggagcgccgggacctggatgacctcaagaaggaggtggctatgacagagcacaagatgtcagtggaagaggtctgccggaaatacaacacagactgtgtgcagggtttgacccacagcaaagcccaggagatcctggcccgggatgggcctaacgcactcacgccaccgcctaccaccccagagtgggtcaagttttgccggcagctcttcgggggcttctccatcctgctgtggatcggggctatcctctgcttcctggcctacggtatccaggcgggcaccgaggacgacccctctggtgacaacctgtacctgggcatcgtgctggcggccgtggtgatcatcactggctgcttctcctactaccaggaggccaagagctccaagatcatggagtccttcaagaacatggtgccccagcaagccctggtgatccgggaaggtgagaagatgcaggtgaacgctgaggaggtggtggtcggggacctggtggagatcaagggtggagaccgagtgccagctgacctgcggatcatctcagcccacggctgcaaggtggacaactcctccctgactggcgaatccgagccccagactcgctctcccgactgcacgcacgacaaccccttggagactcggaacatcaccttcttttccaccaactgtgtggaaggcacggctcggggcgtggtggtggccacgggcgaccgcactgtcatgggccgtatcgccaccctggcatcagggctggaggtgggcaagacgcccatcgccatcgagattgagcacttcatccagctcatcaccggcgtggctgtcttcctgggtgtctccttcttcatcctctccctcattctcggatacacctggcttgaggctgtcatcttcctcatcggcatcatcgtggccaatgtcccagagggtctgctggccactgtcactgtgtgtctgacgctgaccgccaagcgcatggcccggaagaactgcctggtgaagaacctggaggctgtagaaaccctgggctccacgtccaccatctgctcagataagacagggaccctcactcagaaccgcatgacagtcgcccacatgtggtttgacaaccagatccacgaggctgacaccactgaggaccagtcagggacctcatttgacaagagttcgcacacctgggtggccctgtctcacatcgctgggctctgcaatcgcgctgtcttcaagggtggtcaggacaacatccctgtgctcaagagggatgtggctggggatgcgtctgagtctgccctgctcaagtgcatcgagctgtcctctggctccgtgaagctgatgcgtgaacgcaacaagaaagtggctgagattcccttcaattccaccaacaaataccagctctccatccatgagaccgaggaccccaacgacaaccgatacctgctggtgatgaagggtgcccccgagcgcatcctggaccgctgctccaccatcctgctacagggcaaggagcagcctctggacgaggaaatgaaggaggccttccagaatgcctaccttgagctcggtggcctgggcgagcgcgtgcttggtttctgccattattacctgcccgaggagcagttccccaagggctttgccttcgactgtgatgacgtgaacttcaccacggacaacctctgctttgtgggcctcatgtccatgatcgacccaccccgggcagccgtccctgacgcggtgggcaagtgtcgcagcgcaggcatcaaggtcatcatggtcaccggcgatcaccccatcacggccaaggccattgccaagggtgtgggcatcatctctgagggcaacgagactgtggaggacatcgccgcccggctcaacattcccgtcagccaggttaacccccgggatgccaaggcctgcgtgatccacggcaccgacctcaaggacttcacctccgagcaaatcgacgagatcctgcagaatcacaccgagatcgtcttcgcccgcacatccccccagcagaagctcatcattgtggagggctgtcagagacagggtgcaattgtggctgtgaccggggatggtgtgaacgactcccccgctctgaagaaggccgacattggggtggccatgggcatcgctggctctgacgtctccaagcaggcagctgacatgatcctgctggacgacaactttgcctccatcgtcacaggggtggaggagggccgcctgatcttcgacaacctaaagaagtccattgcctacaccctgaccagcaatatcccggagatcacgcccttcctgctgttcatcatggccaacatcccgctgcccctgggcaccatcaccatcctctgcatcgatctgggcactgacatggtccctgccatctcactggcgtacgaggctgccgaaagcgacatcatgaagagacagcccaggaacccgcggacggacaaattggtcaatgagagactcatcagcatggcctacgggcagattggaatgatccaggctctcggtggcttcttctcttactttgtgatcctggcagaaaatggcttcttgcccggcaacctggtgggcatccggctgaactgggatgaccgcaccgtcaatgacctggaagacagttacgggcagcagtggacatacgagcagaggaaggtggtggagttcacctgccacacggccttctttgtgagcatcgttgtcgtccagtgggccgatctgatcatctgcaagacccggaggaactcggtcttccagcagggcatgaagaacaagatcctgatcttcgggctgtttgaggagacggccctggctgccttcctgtcctactgccccggcatggacgtggccctgcgcatgtaccctctcaagcccagctggtggttctgtgccttcccctacagtttcctcatcttcgtctacgacgaaatccgcaaactcatcctgcgcaggaacccagggggttgggtggagaaggaaacctactactgacctcagccccaccacatcgcccatctcttccccgtcccgcaggcccaggaccgcccctgtcagtccccccaattttgtattctggggggaggagccctctcttcctgtggccccaccttggcccccaccccctccactatctcctgccgcccccactctggctggcttctctcccctgccccaaacctctctcctctctcttttctgtgtcagtttctctccctctcctcacccctctatccattcctcccgccccagccacctccctgggctcttttttactccccttcagccccccggctgatgccatctctggttctggacaattatcaaatatatcagtggggagagagaa

SEQ ID NO: 549 - DNA, 1816 bp, Homo sapiens
tgatttttcatgtactattttaaaaaaatcagaagcaatgcaaaaatccatgatgaacaaatgatcaacatttgaaatacagacaggatcccaacctgcacttgcatgaccttgtctcgcttgcctcaccctaaacccagccttgacactccaattaaactttatttacaaaacaagggggccggccagtaggatgtagtttgcccatacgacttttttaaagtatcgcattgactactgtttatctcgatgactgaagggttcttttggcatccctgtagcaaatgcgtctcaccctagtcctggtcctgctccaagggtttttgtccaggcacatcgtgacctcacccttcctcccctctccgaggcctctctcagggtccagcgttcaagtcccgggtgttctctggacccgccccttcctctcgccgggtcaggtgccgagggcgagcacgggcggcgcggagagcagtcccggcccgccctccacgactcctcctcctgcgagctgggccactcagcggctctgccgcccagcgcgccggggcccagaccccgccccggccccgcctccgacgcctgccgctccagctccggctccccctatataaatcggccatttgcttcgctccgccccgcagcgccggagtcaaagccggttcccggcccagtcccgtcctgcagcagtctgcctcctctttcaacatgacagatgccgctgtgtccttcgccaaggacttcctggcaggtggagtggccgcagccatctccaagacggcggtagcgcccatcgagcgggtcaagctgctgctgcaggtgcagcatgccagcaagcagatcactgcagataagcaatacaaaggcattatagactgcgtggtccgtattcccaaggagcagggagttctgtccttctggcgcggtaacctggccaatgtcatcagatacttccccacccaggctcttaacttcgccttcaaagataaatacaagcagatcttcctgggtggtgtggacaagagaacccagttttggcgctactttgcagggaatctggcatcgggtggtgccgcaggggccacatccctgtgttttgtgtaccctcttgattttgcccgtacccgtctagcagctgatgtgggtaaagctggagctgaaagggaattccgaggcctcggtgactgcctggttaagatctacaaatctgatgggattaagggcctgtaccaaggctttaacgtgtctgtgcagggtattatcatctaccgagccgcctacttcggtatctatgacactgcaaagggtaagtttgctgtggggctctgctttatttagcctagtgaatcttaggatttttcatcggccttcagtcactaactccatgtctttattctttgcagctgacatcatgtacacaggcacgcttgactgctggcggaagattgctcgtgatgaaggaggcaaagcttttttcaagggtgcatggtccaatgttctcagaggcatgggtggtgcttttgtgcttgtcttgtatgatgaaatcaagaagtacacataagttatttcctaggatttttccccctgtgaacaggcatgttgtattatataacatatcttgagcattcttgacagactcctggctgtcagtttctcagtggcaactatttactggttgaaaatgggaagcaataatattcatctgaccagttttctcttaaagccatttccatgatgatgatgatgggactcaattgtattttttatttcagtcactcctgataaataacaaatttggagaaataaaaatatctaaaat

SEQ ID NO: 550 - DNA, 815 bp, Homo sapiens
aaggacttcctggcaggtggagtggccgcagccatctccaagacggcggtagcgcccatcgagcgggtcaagctgctgctgcagatcttcctgggtggtgtggacaagagaacccagttttggcgctactttgcagggaatctggcatcgggtggtgccgcaggggccacatccctgtgttttgtgtaccctcttgattttgcccgtacccgtctagcagctgatgtgggtaaagctggagctgaaagggaattccgaggcctcggtgactgcctggttaagatctacaaatctgatgggattaagggcctgtaccaaggctttaacgtgtctgtgcagggtattatcatctaccgagccgcctacttcggtatctatgacactgcaaagggcacgcttgactgctggcggaagattgctcgtgatgaaggaggcaaagcttttttcaagggtgcatggtccaatgttctcagaggcatgggtggtgcttttgtgcttgtcttgtatgatgaaatcaagaagtacacataagttatttcctaggatttttccccctgtgaacaggcatgttgtattatataacatatcttgagcattcttgacagactcctggctgtcagtttctcagtggcaactatttactggttgaaaatgggaagcaataatattcatctgaccagttttctcttaaagccatttccatgatgatgatgatgggactcaattgtattttttatttcagtcactcctgataaataacaaatttggagaaataaaaatatctaaaataaattttgtctgcagtatattttcat

SEQ ID NO: 551 - DNA, 1886 bp, Homo sapiens
tgatttttcatgtactattttaaaaaaatcagaagcaatgcaaaaatccatgatgaacaaatgatcaacatttgaaatacagacaggatcccaacctgcacttgcatgaccttgtctcgcttgcctcaccctaaacccagccttgacactccaattaaactttatttacaaaacaagggggccggccagtaggatgtagtttgcccatacgacttttttaaagtatcgcattgactactgtttatctcgatgactgaagggttcttttggcatccctgtagcaaatgcgtctcaccctagtcctggtcctgctccaagggtttttgtccaggcacatcgtgacctcacccttcctcccctctccgaggcctctctcagggtccagcgttcaagtcccgggtgttctctggacccgccccttcctctcgccgggtcaggtgccgagggcgagcacgggcggcgcggagagcagtcccggcccgccctccacgactcctcctcctgcgagctgggccactcagcggctctgccgcccagcgcgccggggcccagaccccgccccggccccgcctccgacgcctgccgctccagctccggctccccctatataaatcggccatttgcttcgctccgccccgcagcgccggagtcaaagccggttcccggcccagtcccgtcctgcagcagtctgcctcctctttcaacatgacagatgccgctgtgtccttcgccaaggacttcctggcaggtggagtggccgcagccatctccaagacggcggtagcgcccatcgagcgggtcaagctgctgctgcaggtgcagcatgccagcaagcagatcactgcagataagcaatacaaaggcattatagactgcgtggtccgtattcccaaggagcagggagttctgtccttctggcgcggtaacctggccaatgtcatcagatacttccccacccaggctcttaacttcgccttcaaagataaatacaagcagatcttcctgggtggtgtggacaagagaacccagttttggcgctactttgcagggaatctggcatcgggtggtgccgcaggggccacatccctgtgttttgtgtaccctcttgattttgcccgtacccgtctagcagctgatgtgggtaaagctggagctgaaagggaattccgaggcctcggtgactgcctggttaagatctacaaatctgatgggattaagggcctgtaccaaggctttaacgtgtctgtgcagggtattatcatctaccgagccgcctacttcggtatctatgacactgcaaagggaatgcttccggatcccaagaacactcacatcgtcatcagctggatgatcgcacagactgtcactgctgttgccgggttgacttcctatccatttgacaccgttcgccgccgcatgatgatgcagtcagggcgcaaaggaactgacatcatgtacacaggcacgcttgactgctggcggaagattgctcgtgatgaaggaggcaaagcttttttcaagggtgcatggtccaatgttctcagaggcatgggtggtgcttttgtgcttgtcttgtatgatgaaatcaagaagtacacataagttatttcctaggatttttccccctgtgaacaggcatgttgtattatataacatatcttgagcattcttgacagactcctggctgtcagtttctcagtggcaactatttactggttgaaaatgggaagcaataatattcatctgaccagttttctcttaaagccatttccatgatgatgatgatgggactcaattgtattttttatttcagtcactcctgataaataacaaatttggagaaataaaaatatctaaaataaattttgtctgcagtatattttcat

SEQ ID NO: 552 - DNA, 3573 bp, Homo sapiens
ccggtgcagcggctggcgatcggccgcggaggtgcgtgcagggcccgcgccgccgccggtatctccaccgccaacacctcagccactgccactgccacagccacacgaggccccccaccgtgcgctccgccgctgcggtcccggatccgcgctccacgcccgcagcccgcggcgccaccagcccagcatgcaccagctctttcagaaaaccccagaaatttactccgtggagctcagcggaactaaggacatcgtgaaaacagacaagggggatggcaaggagaagtataggggtctgaagaacaactgcctggaactcaaaaagaaaaatcacaaagaggagtttcagaaagaactccatctggatgaccacaaactcagcaatagggaattggaagagaaatatggcacagacatcattatgggtctctccagcaccagagctgccgagctcctggcccgggatgggcccaactccctcacccctcccaagcagacgcctgagatcgtcaagttcctcaagcagatggtgggggggttctctatcctcctgtgggtgggcgcctttctctgttggattgcatatgggattcagtactccagcgacaagtctgcatccctgaacaacgtgtacttgggctgtgtgcttggtctggtggtcattttaacggggatctttgcttattaccaagaggcaaaaagcaccaacatcatgtccagcttcaataagatgatccctcagcaagctctcgtcatccgagattccgagaagaagaccatcccttcagagcagctggtggtgggggacattgtggaggtcaaaggaggagaccagatccctgcagacatcagggtgctgtcttctcaggggtgtcgggtggataactcatctctcacgggggagtctgagccccagccccgctcctctgagtttacccatgaaaaccccctggaaacaaagaacatctgcttctattccacaacgtgtctggaaggcactgtcaccggcatggttatcaacacgggtgaccgcaccatcattggccatattgcctcattggcctcaggagttggaaatgagaagacgcccattgccattgagatcgagcactttgttcacattgtggcaggagtggctgtctccatcggcatccttttcttcatcatcgctgtgtccctgaagtatcaagtcctggactccatcatcttcctcattggcatcattgtggccaatgtgcccgagggcctcctggccactgtcactgtgaccctgtcgctgacagcaaaacggatggccaagaagaactgcctggtgaagaacctggaggctgtggagaccctcggctccacctccatcatctgctcggacaagactgggacactgacccagaacaggatgacagtggcccatctgtggttcgacaatcagatctttgtggctgacaccagtgaggaccattcaaaccaagtctttgaccaaagctctaggacttgggcctccttatccaagataataacattgtgtaaccgagcagagttcaagccaggacaggaaaatgtccccatcatgaagaaagctgtgattggagatgcctcagaaactgctcttttaaaattctcagaggtcattttgggtgatgtgatggaaattagaaaaagaaaccgcaaagtagctgaaatcccttttaactctactaataaatttcagctctccatccacgagatggatgacccccacggcaagcgcttcctcatggtgatgaagggggcccctgagcgcatcctagagaaatgcagcaccatcatgatcaacggcgaggagcacccactggacaagagcactgccaagaccttccacacagcctacatggagctgggcgggttgggcgagcgtgtgctgggtttctgtcatctctacctgccagcagacgagtttccagaaacctactcatttgacatagacgctatgaactttccgacctccaacctctgttttgtgggactcttgtcaatgatcgatccccctcggtccaccgtgccagatgcagtcaccaaatgccggagtgcagggatcaaggttattatggttactggtgatcatcccatcacagccaaagctattgccaagagtgtggggatcatttcagccaacagtgaaacagtggaagacattgcacatcgcctcaacattgctgtggagcaagttaacaaacgggatgccaaggccgctgtggtgactggcatggagctgaaggacatgagctcagaacagctggatgagatcttagccaactaccaggagattgtctttgcccggacatccccccagcagaagctgatcattgtggagggctgtcagaggcaggatgctgttgttgctgtgaccggggatggagttaatgactctccggctctaaagaaggcagacattgggattgccatggggatagcaggttctgatgcagccaaaaatgcagccgacatggtcttgctggacgacaacttcgcatccatcgtcacaggggtggaggaaggtcgcctgatctttgacaacctcaagaagactattgcttattccctgaccaagaacattgccgagctgtgcccctttctgatctacatcattgtcgggctccccctgcccattggcaccatcaccattctgttcattgacttggggacagacattatcccctccattgccttggcgtacgagaaagctgaaagtgacatcatgaacaggaagcctcgccacaagaataaggacaggctggtgaaccagccgctcgctgtgtactcatacctgcacattggcctcatgcaagccctgggagctttccttgtgtatttcaccgtctatgcacaagagggctttctgccccgcactctcattaacctgcgggtagaatgggagaaggactacgtgaatgacttgaaagacagctatgggcaggaatggacaaggtaccagagggaatacctagaatggacgggctacacggctttctttgttggcatcctagtccagcaaatagcagatctgatcatcaggaaaacccggaggaattccatcttccagcagggtctcttcagaaataaagtcatctgggtggggatcacctcacagatcatcattggtctgatcctctcctatggcctcggaagtgtcacagccttgagtttcaccatgcttagggctcagtactggtttgtggctgtgccgcacgccatcctgatctgggtgtatgatgaggtgcggaagctcttcatcaggctctaccctggaagctggtgggataagaacatgtattattaagaccacctcccttcctatgtctctcagcagcacgttggggcacacttgttcatcttctgaccgtttgctgggctattcccctgcagtgcagacatcgtcaaaattcagacaagaggaaattttcatgcagaaagctgtatgcaggatgctcactgatgttttgcactttaaaactgaaattcaactctttatataggattttcttttctatctccatctcctcattaaaaaatacgtacatttcgaggtaatggtat

SEQ ID NO: 553 - DNA, 1597 bp, Homo sapiens
cagcgctggaggccgctgctcgctgcgccaccgcctcccgccacccctgcccgcccgacagcgccgccgcctgccccgccatgggtcgacagaaggagctggtgtcccgctgcggggagatgctccacatccgctaccggctgctccgacaggcgctggccgagtgcctggggaccctcatcctcgtgatgtttggctgtggctccgtggcccaggttgtgctcagccggggcacccacggtggtttcctcaccatcaacctggcctttggctttgctgtcactctgggcatcctcatcgctggccaggtctctggggcccacctgaaccctgccgtgacctttgccatgtgcttcctggctcgtgagccctggatcaagctgcccatctacaccctggcacagacgctgggagccttcttgggtgctggaatagtttttgggctgtattatgatgcaatctggcactttgccgacaaccagctttttgtttcgggccccaatggcacagccggcatctttgctacctacccctctggacacttggatatgatcaatggcttctttgaccagttcataggcacagcctcccttatcgtgtgtgtgctggccattgttgacccctacaacaaccccgtcccccgaggcctggaggccttcaccgtgggcctggtggtcctggtcattggcacctccatgggcttcaactccggctatgccgtcaaccctgcccgggactttggcccccgcctttttacagcccttgcgggctggggctctgcagtcttcacgaccggccagcattggtggtgggtgcccatcgtgtccccactcctgggctccattgcgggtgtcttcgtgtaccagctgatgatcggctgccacctggagcagcccccaccctccaacgaggaagagaatgtgaagctggcccatgtgaagcacaaggagcagatctgagtgggcaggggccatctccccactccgctgccctggccttgagcatccactgactgtccaagggccactcccaagaagcccccttcacgatccaccctttcaggctaaggagctccctatctaccctcaccccacgagacagccccttcaggatttccactggaccttgcccaaatagcaccttaggccactgcccctaagctggggtggaaccggaatttgggtcaatacatccttttgtctcccaagggaagagaatgggcagcaggtatgtgtgtgtgtgcatgtgtgtgcatgtgtgtgcatgtgtgtgcaggggtgtgtgtgtgtggggctgggaggagggggccacagcttaggtttggagctctggatgtacatacataagtaggagcagtgggacgtgtttctgtcataatgcaggcatgaagggtggagtgaagtcaggtcataagtttcatgtttgcttttgttttgttttgtttttaatgtatgtagcagatgttacagtcttagggatccgggatgggagaccccactttagaaagggtcgtcactcctttaatcctctactcaacaatgtactcttttacttttatattaaaaaaaataaaataaatatgtgcctaaaacctcca

SEQ ID NO: 554 - DNA, 1842 bp, Homo sapiens
cagcgctggaggccgctgctcgctgcgccaccgcctcccgccacccctgcccgcccgacagcgccgccgcctgccccgccatgggtcgacagaaggagctggtgtcccgctgcggggagatgctccacatccgctaccggctgctccgacaggcgctggccgagtgcctggggaccctcatcctcgtgatgtttggctgtggctccgtggcccaggttgtgctcagccggggcacccacggtggtttcctcaccatcaacctggcctttggctttgctgtcactctgggcatcctcatcgctggccaggtctctggggcccacctgaaccctgccgtgacctttgccatgtgcttcctggctcgtgagccctggatcaagctgcccatctacaccctggcacagacgctgggagccttcttgggtgctggaatagtttttgggctgtattatgatgcaatctggcactttgccgacaaccagctttttgtttcgggccccaatggcacagccggcatctttgctacctacccctctggacacttggatatgatcaatggcttctttgaccagttcataggcacagcctcccttatcgtgtgtgtgctggccattgttgacccctacaacaaccccgtcccccgaggcctggaggccttcaccgtgggcctggtggtcctggtcattggcacctccatgggcttcaactccggctatgccgtcaaccctgcccgggactttggcccccgcctttttacagcccttgcgggctggggctctgcagtcttcacgaccggccagcattggtggtgggtgcccatcgtgtccccactcctgggctccattgcgggtgtcttcgtgtaccagctgatgatcggctgccacctggagcagcccccaccctccaacgaggaagagaatgtgaagctggcccatgtgaagcacaaggagcagatctgagtgggcaggggccatctccccactccgctgccctggccttgagcatccactgactgtccaagggccactcccaagaagcccccttcacgatccaccctttcaggctaaggagctccctatctaccctcaccccacgagacagccccttcaggatttccactggaccttgcccaaatagcaccttaggccactgcccctaagctggggtggaaccggaatttgggtcaatacatccttttgtctcccaagggaagagaatgggcagcaggtatgtgtgtgtgtgcatgtgtgtgcatgtgtgtgcatgtgtgtgcaggggtgtgtgtgtgtggggggggttcccagatattcagggcaagggaccagtcggaagggattctggctattgggggagcccagagacaggggaaggcagcctgtccatctgtgcataaggagaggaaagttccagggtgtgtatgtttcaggggcttcacatggaggagctgcagatagatatgtgtttctgtgtatgtgtatgtctgcctttttttctaagtgggggcttctacaggcttttgggaagtagggtggatgtgggtagggctgggaggagggggccacagcttaggtttggagctctggatgtacatacataagtaggagcagtgggacgtgtttctgtcataatgcaggcatgaagggtggagtgaagtcaggtcataagtttcatgtttgcttttgttttgttttgtttttaatgtatgtagcagatgttacagtcttagggatccgggatgggagaccccactttagaaagggtcgtcactcctttaatcctctactcaacaatgtactcttttacttttatattaaaaaaaataaaataaatatgtgcctaaaa

SEQ ID NO: 555 - DNA, 633 bp, Homo sapiens
cagcgctggaggccgctgctcgctgcgccaccgcctcccgccacccctgcccgcccgacagcgccgccgcctgccccgccatgggtcgacagaaggagctggtgtcccgctgcggggagatgctccacatccgctaccggctgctccgacaggcgctggccgagtgcctggggaccctcatcctcgtgatgtttggctgtggctccgtggcccaggttgtgctcagccggggcacccacggtggtttcctcaccatcaacctggcctttggctttgctgtcactctgggcatcctcatcgctggccaggtctctggggcccacctgaaccctgccgtgacctttgccatgtgcttcctggctcgtgagccctggatcaagctgcccatctacaccctggcacagacgctgggagccttcttgggtgctggaatagtttttgggctgtattatggtaagcattccccaccctgtcctcctccactacccccgtccctctgttcaggacctgctggcaccaggccttttgatgacagacggctaggacctgcccaggccccgggctcatgactcactcattcacgcacagggtcaaggtagggggcacgaagggaaagaaacaagttgggcaata

SEQ ID NO: 556 - DNA, 4725 bp, Homo sapiens
cagcatcctggcgcgggccggggccgccgccgccactgccgtcgggtaaggtcccagcacggacatggcctcgcgcggcgcccgcccgggcccgagtcccccgcgccccgctttgtagccccccggcggagaggcggcctcgacggtgcggacggcgcagacggccgggcgggcggcatggaggcggcgcatctgctcccggccgccgacgtgctgcgccacttctcggtgacagccgagggcggcctgagcccggcgcaggtgaccggcgcgcgggagcgctacggccccaacgacatgacccccgttcccagggaagtccctgtgggagctggtgctggaacagtttgaggacctcctggtgcgcatcctgctgctggctgcccttgtctcctttgtcctggcctggttcgaggagggcgaggagaccacgaccgccttcgtggagcccctggtcatcatgctgatcctcgtggccaacgccattgtgggcgtgtggcaggaacgcaacgccgagagtgccatcgaggccctgaaggagtatgagcctgagatgggcaaggtgatccgctcggaccgcaagggcgtgcagaggatccgtgcccgggacatcgtcccaggggacattgtagaagtggcagtgggggacaaagtgcctgctgacctccgcctcatcgagatcaagtccaccacgctgcgagtggaccagtccatcctgacgggtgaatctgtgtccgtgaccaagcacacagaggccatcccagaccccagagctgtgaaccaggacaagaagaacatgctgttttctggcaccaatatcacatcgggcaaagcggtgggtgtggccgtggccaccggcctgcacacggagctgggcaagatccggagccagatggcggcagtcgagcccgagcggacgccgctgcagcgcaagctggacgagtttggacggcagctgtcccacgccatctctgtgatctgcgtggccgtgtgggtcatcaacatcggccacttcgccgacccggcccacggtggctcctggctgcgtggcgctgtctactacttcaagatcgccgtggccctggcggtggcggccatccccgagggcctcccggctgtcatcactacatgcctggcactgggcacgcggcgcatggcacgcaagaacgccatcgtgcgaagcctgccgtccgtggagaccctgggctgcacctcagtcatctgctccgacaagacgggcacgctcaccaccaatcagatgtctgtctgccggatgttcgtggtagccgaggccgatgcgggctcctgccttttgcacgagttcaccatctcgggtaccacgtatacccccgagggcgaagtgcggcagggggatcagcctgtgcgctgcggccagttcgacgggctggtggagctggcgaccatctgcgccctgtgcaacgactcggctctggactacaacgaggccaagggtgtgtatgagaaggtgggagaggccacggagacagctctgacttgcctggtggagaagatgaacgtgttcgacaccgacctgcaggctctgtcccgggtggagcgagctggcgcctgtaacacggtcatcaagcagctgatgcggaaggagttcaccctggagttctcccgagaccggaaatccatgtccgtgtactgcacgcccacccgccctcaccctactggccagggcagcaagatgtttgtgaagggggctcctgagagtgtgatcgagcgctgtagctcagtccgcgtggggagccgcacagcacccctgacccccacctccagggagcagatcctggcaaagatccgggattggggctcaggctcagacacgctgcgctgcctggcactggccacccgggacgcgcccccaaggaaggaggacatggagctggacgactgcagcaagtttgtgcagtacgagacggacctgaccttcgtgggctgcgtaggcatgctggacccgccgcgacctgaggtggctgcctgcatcacacgctgctaccaggcgggcatccgcgtggtcatgatcacgggggataacaaaggcactgccgtggccatctgccgcaggcttggcatctttggggacacggaagacgtggcgggcaaggcctacacgggccgcgagtttgatgacctcagccccgagcagcagcgccaggcctgccgcaccgcccgctgcttcgcccgcgtggagcccgcacacaagtcccgcatcgtggagaacctgcagtcctttaacgagatcactgctatgactggcgatggagtgaacgacgcaccagccctgaagaaagcagagatcggcatcgccatgggctcaggcacggccgtggccaagtcggcggcagagatggtgctgtcagatgacaactttgcctccatcgtggctgcggtggaggagggccgggccatctacagcaacatgaagcaattcatccgctacctcatctcctccaatgttggcgaggtcgtctgcatcttcctcacggcaattctgggcctgcccgaagccctgatccctgtgcagctgctctgggtgaacctggtgacagacggcctacctgccacggctctgggcttcaacccgccagacctggacatcatggagaagctgccccggagcccccgagaagccctcatcagtggctggctcttcttccgatacctggctatcggagtgtacgtaggcctggccacagtggctgccgccacctggtggtttgtgtatgacgccgagggacctcacatcaacttctaccagctgaggaacttcctgaagtgctccgaagacaacccgctctttgccggcatcgactgtgaggtgttcgagtcacgcttccccaccaccatggccttgtccgtgctcgtgaccattgaaatgtgcaatgccctcaacagcgtctcggagaaccagtcgctgctgcggatgccgccctggatgaacccctggctgctggtggctgtggccatgtccatggccctgcacttcctcatcctgctcgtgccgcccctgcctctcattttccaggtgaccccactgagcgggcgccagtgggtggtggtgctccagatatctctgcctgtcatcctgctggatgaggccctcaagtacctgtcccggaaccacatgcacgaagaaatgagccagaagtgagcgctgggaacagggtggagtctccggtgtgtacctcagactgatggtgcccatgtgttcgcctccgccccccacccttgccaccacactcgcccacttgcccaccgggtcccgccggataaatgacaggcccgaggtcagaatggccatccccgggccccgtcctggggtctctgtccccacttccttctggcctgggaggtctgtaattcctgtctcctggactctcctgggaagttccctgctctgcagctctggcccaggagctgcaggctgggagggggcagccaagaagccggagctggcagcatacccagagatccggggcccccccacccccaaatcacgagtgcagctggagcttgctcccccttgttcggaagctggacgttcacttggtgactggtgcctctgcactgacggaggactctgggggtccttcttaccggctctgacctctctcttcgtgcctggtctgggactgggtcagccctgggggatcagaaggggccatctgggcccagctgtgtacagcgagggtgggcagccccctccactccactctgcttccacaaagtcggctcccgagagctcgaggctgcttctgtttatatgtgcagggcccgggcgggtgaagggtcagagagacggacacaaggagccggcaggagggcggagcgaggatgtcctttcccgggagacaagtcgggaaagcctggctggactgcctcagccccgcgcgcctcctggactcagggttccccgtcctgagctcgggagatgttcagagtcacactgccgcccggtctgccacgcagaggtccaacttgccacccgcgtccctggtacctgagaccaccgacatcctcaggttcctgaccgtggcgcccttctacccagcccagtgtgcggccgccgcgctgtctgcacagctgggggcctctgagcctggtgggcttcctggactcttggcctcactccttgccccctccccacgacacccatgagccgaaaggatgtcactaaggatggctgattccccaagggcacccgctctccctccctccctgctggaggaacacgtcatatcagatgagaggaagatggcctctgatggacagaatttttctcttaactcagcttttgctactttggcaaaaactagcgaggggtagcagaaacctgcaccaaggattgtccctatgtcttggcccctcctagagcgtgtgcagactgatgattttatatgtaaatcaagactcacatccctttcctagtcccccacatccaaagcccctcagcctgccttgcagaccaatgggctccatgttctgtagccccctcccctacgcctcacccctcctccctctcacaggttctgggcggccagtgagagaaacgcagtgggggaggcagggagtctggtgcctgcagagattctctgcttctttcctggggggaggtggggaggtcttagcaggagcgggccctgtacccacctgctgacctgctgtttggtagagaaataaaggttgtgtgactggggg

SEQ ID NO: 557 - DNA, 4812 bp, Homo sapiens
cagcatcctggcgcgggccggggccgccgccgccactgccgtcgggtaaggtcccagcacggacatggcctcgcgcggcgcccgcccgggcccgagtcccccgcgccccgctttgtagccccccggcggagaggcggcctcgacggtgcggacggcgcagacggccgggcgggcggcatggaggcggcgcatctgctcccggccgccgacgtgctgcgccacttctcggtgacagccgagggcggcctgagcccggcgcaggtgaccggcgcgcgggagcgctacggccccaacgagctcccgagtgaggaagggaagtccctgtgggagctggtgctggaacagtttgaggacctcctggtgcgcatcctgctgctggctgcccttgtctcctttgtcctggcctggttcgaggagggcgaggagaccacgaccgccttcgtggagcccctggtcatcatgctgatcctcgtggccaacgccattgtgggcgtgtggcaggaacgcaacgccgagagtgccatcgaggccctgaaggagtatgagcctgagatgggcaaggtgatccgctcggaccgcaagggcgtgcagaggatccgtgcccgggacatcgtcccaggggacattgtagaagtggcagtgggggacaaagtgcctgctgacctccgcctcatcgagatcaagtccaccacgctgcgagtggaccagtccatcctgacgggtgaatctgtgtccgtgaccaagcacacagaggccatcccagaccccagagctgtgaaccaggacaagaagaacatgctgttttctggcaccaatatcacatcgggcaaagcggtgggtgtggccgtggccaccggcctgcacacggagctgggcaagatccggagccagatggcggcagtcgagcccgagcggacgccgctgcagcgcaagctggacgagtttggacggcagctgtcccacgccatctctgtgatctgcgtggccgtgtgggtcatcaacatcggccacttcgccgacccggcccacggtggctcctggctgcgtggcgctgtctactacttcaagatcgccgtggccctggcggtggcggccatccccgagggcctcccggctgtcatcactacatgcctggcactgggcacgcggcgcatggcacgcaagaacgccatcgtgcgaagcctgccgtccgtggagaccctgggctgcacctcagtcatctgctccgacaagacgggcacgctcaccaccaatcagatgtctgtctgccggatgttcgtggtagccgaggccgatgcgggctcctgccttttgcacgagttcaccatctcgggtaccacgtatacccccgagggcgaagtgcggcagggggatcagcctgtgcgctgcggccagttcgacgggctggtggagctggcgaccatctgcgccctgtgcaacgactcggctctggactacaacgaggccaagggtgtgtatgagaaggtgggagaggccacggagacagctctgacttgcctggtggagaagatgaacgtgttcgacaccgacctgcaggctctgtcccgggtggagcgagctggcgcctgtaacacggtcatcaagcagctgatgcggaaggagttcaccctggagttctcccgagaccggaaatccatgtccgtgtactgcacgcccacccgccctcaccctactggccagggcagcaagatgtttgtgaagggggctcctgagagtgtgatcgagcgctgtagctcagtccgcgtggggagccgcacagcacccctgacccccacctccagggagcagatcctggcaaagatccgggattggggctcaggctcagacacgctgcgctgcctggcactggccacccgggacgcgcccccaaggaaggaggacatggagctggacgactgcagcaagtttgtgcagtacgagacggacctgaccttcgtgggctgcgtaggcatgctggacccgccgcgacctgaggtggctgcctgcatcacacgctgctaccaggcgggcatccgcgtggtcatgatcacgggggataacaaaggcactgccgtggccatctgccgcaggcttggcatctttggggacacggaagacgtggcgggcaaggcctacacgggccgcgagtttgatgacctcagccccgagcagcagcgccaggcctgccgcaccgcccgctgcttcgcccgcgtggagcccgcacacaagtcccgcatcgtggagaacctgcagtcctttaacgagatcactgctatgactggcgatggagtgaacgacgcaccagccctgaagaaagcagagatcggcatcgccatgggctcaggcacggccgtggccaagtcggcggcagagatggtgctgtcagatgacaactttgcctccatcgtggctgcggtggaggagggccgggccatctacagcaacatgaagcaattcatccgctacctcatctcctccaatgttggcgaggtcgtctgcatcttcctcacggcaattctgggcctgcccgaagccctgatccctgtgcagctgctctgggtgaacctggtgacagacggcctacctgccacggctctgggcttcaacccgccagacctggacatcatggagaagctgccccggagcccccgagaagccctcatcagtggctggctcttcttccgatacctggctatcggagtgtacgtaggcctggccacagtggctgccgccacctggtggtttgtgtatgacgccgagggacctcacatcaacttctaccagctgaggaacttcctgaagtgctccgaagacaacccgctctttgccggcatcgactgtgaggtgttcgagtcacgcttccccaccaccatggccttgtccgtgctcgtgaccattgaaatgtgcaatgccctcaacagcgtctcggagaaccagtcgctgctgcggatgccgccctggatgaacccctggctgctggtggctgtggccatgtccatggccctgcacttcctcatcctgctcgtgccgcccctgcctctcattttccaggtgaccccactgagcgggcgccagtgggtggtggtgctccagatatctctgcctgtcatcctgctggatgaggccctcaagtacctgtcccggaaccacatgcacgcctgtctttatccaggccttctcaggacagtctcgcaggcctggagtaggcagccgctgaccacctcttggaccccagaccacaccggaagaaatgagccagaagtgagcgctgggaacagggtggagtctccggtgtgtacctcagactgatggtgcccatgtgttcgcctccgccccccacccttgccaccacactcgcccacttgcccaccgggtcccgccggataaatgacaggcccgaggtcagaatggccatccccgggccccgtcctggggtctctgtccccacttccttctggcctgggaggtctgtaattcctgtctcctggactctcctgggaagttccctgctctgcagctctggcccaggagctgcaggctgggagggggcagccaagaagccggagctggcagcatacccagagatccggggcccccccacccccaaatcacgagtgcagctggagcttgctcccccttgttcggaagctggacgttcacttggtgactggtgcctctgcactgacggaggactctgggggtccttcttaccggctctgacctctctcttcgtgcctggtctgggactgggtcagccctgggggatcagaaggggccatctgggcccagctgtgtacagcgagggtgggcagccccctccactccactctgcttccacaaagtcggctcccgagagctcgaggctgcttctgtttatatgtgcagggcccgggcgggtgaagggtcagagagacggacacaaggagccggcaggagggcggagcgaggatgtcctttcccgggagacaagtcgggaaagcctggctggactgcctcagccccgcgcgcctcctggactcagggttccccgtcctgagctcgggagatgttcagagtcacactgccgcccggtctgccacgcagaggtccaacttgccacccgcgtccctggtacctgagaccaccgacatcctcaggttcctgaccgtggcgcccttctacccagcccagtgtgcggccgccgcgctgtctgcacagctgggggcctctgagcctggtgggcttcctggactcttggcctcactccttgccccctccccacgacacccatgagccgaaaggatgtcactaaggatggctgattccccaagggcacccgctctccctccctccctgctggaggaacacgtcatatcagatgagaggaagatggcctctgatggacagaatttttctcttaactcagcttttgctactttggcaaaaactagcgaggggtagcagaaacctgcaccaaggattgtccctatgtcttggcccctcctagagcgtgtgcagactgatgattttatatgtaaatcaagactcacatccctttcctagtcccccacatccaaagcccctcagcctgccttgcagaccaatgggctccatgttctgtagccccctcccctacgcctcacccctcctccctctcacaggttctgggcggccagtgagagaaacgcagtgggggaggcagggagtctggtgcctgcagagattctctgcttctttcctggggggaggtggggaggtcttagcaggagcgggccctgtacccacctgctgacctgctgtttggtagagaaataaaggttgtgtgactggggg

SEQ ID NO: 558 - DNA, 3198 bp, Homo sapiens
cagcatcctggcgcgggccggggccgccgccgccactgccgtcgggtaaggtcccagcacggacatggcctcgcgcggcgcccgcccgggcccgagtcccccgcgccccgctttgtagccccccggcggagaggcggcctcgacggtgcggacggcgcagacggccgggcgggcggcatggaggcggcgcatctgctcccggccgccgacgtgctgcgccacttctcggtgacagccgagggcggcctgagcccggcgcaggtgaccggcgcgcgggagcgctacggccccaacgagctcccgagtgaggaagggaagtccctgtgggagctggtgctggaacagtttgaggacctcctggtgcgcatcctgctgctggctgcccttgtctcctttgtcctggcctggttcgaggagggcgaggagaccacgaccgccttcgtggagcccctggtcatcatgctgatcctcgtggccaacgccattgtgggcgtgtggcaggaacgcaacgccgagagtgccatcgaggccctgaaggagtatgagcctgagatgggcaaggtgatccgctcggaccgcaagggcgtgcagaggatccgtgcccgggacatcgtcccaggggacattgtagaagtggcagtgggggacaaagtgcctgctgacctccgcctcatcgagatcaagtccaccacgctgcgagtggaccagtccatcctgacgggtgaatctgtgtccgtgaccaagcacacagaggccatcccagaccccagagctgtgaaccaggacaagaagaacatgctgttttctggcaccaatatcacatcgggcaaagcggtgggtgtggccgtggccaccggcctgcacacggagctgggcaagatccggagccagatggcggcagtcgagcccgagcggacgccgctgcagcgcaagctggacgagtttggacggcagctgtcccacgccatctctgtgatctgcgtggccgtgtgggtcatcaacatcggccacttcgccgacccggcccacggtggctcctggctgcgtggcgctgtctactacttcaagatcgccgtggccctggcggtggcggccatccccgagggcctcccggctgtcatcactacatgcctggcactgggcacgcggcgcatggcacgcaagaacgccatcgtgcgaagcctgccgtccgtggagaccctgggctgcacctcagtcatctgctccgacaagacgggcacgctcaccaccaatcagatgtctgtctgccggatgttcgtggtagccgaggccgatgcgggctcctgccttttgcacgagttcaccatctcgggtaccacgtatacccccgagggcgaagtgcggcagggggatcagcctgtgcgctgcggccagttcgacgggctggtggagctggcgaccatctgcgccctgtgcaacgactcggctctggactacaacgaggccaagggtgtgtatgagaaggtgggagaggccacggagacagctctgacttgcctggtggagaagatgaacgtgttcgacaccgacctgcaggctctgtcccgggtggagcgagctggcgcctgtaacacgggggctcctgagagtgtgatcgagcgctgtagctcagtccgcgtggggagccgcacagcacccctgacccccacctccagggagcagatcctggcaaagatccgggattggggctcaggctcagacacgctgcgctgcctggcactggccacccgggacgcgcccccaaggaaggaggacatggagctggacgactgcagcaagtttgtgcagtacgagacggacctgaccttcgtgggctgcgtaggcatgctggacccgccgcgacctgaggtggctgcctgcatcacacgctgctaccaggcgggcatccgcgtggtcatgatcacgggggataacaaaggcactgccgtggccatctgccgcaggcttggcatctttggggacacggaagacgtggcgggcaaggcctacacgggccgcgagtttgatgacctcagccccgagcagcagcgccaggcctgccgcaccgcccgctgcttcgcccgcgtggagcccgcacacaagtcccgcatcgtggagaacctgcagtcctttaacgagatcactgctatgactggcgatggagtgaacgacgcaccagccctgaagaaagcagagatcggcatcgccatgggctcaggcacggccgtggccaagtcggcggcagagatggtgctgtcagatgacaactttgcctccatcgtggctgcggtggaggagggccgggccatctacagcaacatgaagcaattcatccgctacctcatctcctccaatgttggcgaggtcgtctgcatcttcctcacggcaattctgggcctgcccgaagccctgatccctgtgcagctgctctgggtgaacctggtgacagacggcctacctgccacggctctgggcttcaacccgccagacctggacatcatggagaagctgccccggagcccccgagaagccctcatcagtggctggctcttcttccgatacctggctatcggagtgtacgtaggcctggccacagtggctgccgccacctggtggtttgtgtatgacgccgagggacctcacatcaacttctaccagctgaggaacttcctgaagtgctccgaagacaacccgctctttgccggcatcgactgtgaggtgttcgagtcacgcttccccaccaccatggccttgtccgtgctcgtgaccattgaaatgtgcaatgccctcaacagcgtctcggagaaccagtcgctgctgcggatgccgccctggatgaacccctggctgctggtggctgtggccatgtccatggccctgcacttcctcatcctgctcgtgccgcccctgcctctcattttccaggtgaccccactgagcgggcgccagtgggtggtggtgctccagatatctctgcctgtcatcctgctggatgaggccctcaagtacctgtcccggaaccacatgcacgcctgtctttatccaggccttctcaggacagtctcgcaggcctggagtaggcagccgctgaccacctcttggaccccagaccacaccgggttggcctctttgggccagggacacagcatcgtctcgctgtcagagctgctcagagagggaggaagcaggggtgagctc

SEQ ID NO: 559 - DNA, 4706 bp, Homo sapiens
cagcatcctggcgcgggccggggccgccgccgccactgccgtcgggtaaggtcccagcacggacatggcctcgcgcggcgcccgcccgggcccgagtcccccgcgccccgctttgtagccccccggcggagaggcggcctcgacggtgcggacggcgcagacggccgggcgggcggcatggaggcggcgcatctgctcccggccgccgacgtgctgcgccacttctcggtgacagccgagggcggcctgagcccggcgcaggtgaccggcgcgcgggagcgctacggccccaacgggaagtccctgtgggagctggtgctggaacagtttgaggacctcctggtgcgcatcctgctgctggctgcccttgtctcctttgtcctggcctggttcgaggagggcgaggagaccacgaccgccttcgtggagcccctggtcatcatgctgatcctcgtggccaacgccattgtgggcgtgtggcaggaacgcaacgccgagagtgccatcgaggccctgaaggagtatgagcctgagatgggcaaggtgatccgctcggaccgcaagggcgtgcagaggatccgtgcccgggacatcgtcccaggggacattgtagaagtggcagtgggggacaaagtgcctgctgacctccgcctcatcgagatcaagtccaccacgctgcgagtggaccagtccatcctgacgggtgaatctgtgtccgtgaccaagcacacagaggccatcccagaccccagagctgtgaaccaggacaagaagaacatgctgttttctggcaccaatatcacatcgggcaaagcggtgggtgtggccgtggccaccggcctgcacacggagctgggcaagatccggagccagatggcggcagtcgagcccgagcggacgccgctgcagcgcaagctggacgagtttggacggcagctgtcccacgccatctctgtgatctgcgtggccgtgtgggtcatcaacatcggccacttcgccgacccggcccacggtggctcctggctgcgtggcgctgtctactacttcaagatcgccgtggccctggcggtggcggccatccccgagggcctcccggctgtcatcactacatgcctggcactgggcacgcggcgcatggcacgcaagaacgccatcgtgcgaagcctgccgtccgtggagaccctgggctgcacctcagtcatctgctccgacaagacgggcacgctcaccaccaatcagatgtctgtctgccggatgttcgtggtagccgaggccgatgcgggctcctgccttttgcacgagttcaccatctcgggtaccacgtatacccccgagggcgaagtgcggcagggggatcagcctgtgcgctgcggccagttcgacgggctggtggagctggcgaccatctgcgccctgtgcaacgactcggctctggactacaacgaggccaagggtgtgtatgagaaggtgggagaggccacggagacagctctgacttgcctggtggagaagatgaacgtgttcgacaccgacctgcaggctctgtcccgggtggagcgagctggcgcctgtaacacggtcatcaagcagctgatgcggaaggagttcaccctggagttctcccgagaccggaaatccatgtccgtgtactgcacgcccacccgccctcaccctactggccagggcagcaagatgtttgtgaagggggctcctgagagtgtgatcgagcgctgtagctcagtccgcgtggggagccgcacagcacccctgacccccacctccagggagcagatcctggcaaagatccgggattggggctcaggctcagacacgctgcgctgcctggcactggccacccgggacgcgcccccaaggaaggaggacatggagctggacgactgcagcaagtttgtgcagtacgagacggacctgaccttcgtgggctgcgtaggcatgctggacccgccgcgacctgaggtggctgcctgcatcacacgctgctaccaggcgggcatccgcgtggtcatgatcacgggggataacaaaggcactgccgtggccatctgccgcaggcttggcatctttggggacacggaagacgtggcgggcaaggcctacacgggccgcgagtttgatgacctcagccccgagcagcagcgccaggcctgccgcaccgcccgctgcttcgcccgcgtggagcccgcacacaagtcccgcatcgtggagaacctgcagtcctttaacgagatcactgctatgactggcgatggagtgaacgacgcaccagccctgaagaaagcagagatcggcatcgccatgggctcaggcacggccgtggccaagtcggcggcagagatggtgctgtcagatgacaactttgcctccatcgtggctgcggtggaggagggccgggccatctacagcaacatgaagcaattcatccgctacctcatctcctccaatgttggcgaggtcgtctgcatcttcctcacggcaattctgggcctgcccgaagccctgatccctgtgcagctgctctgggtgaacctggtgacagacggcctacctgccacggctctgggcttcaacccgccagacctggacatcatggagaagctgccccggagcccccgagaagccctcatcagtggctggctcttcttccgatacctggctatcggagtgtacgtaggcctggccacagtggctgccgccacctggtggtttgtgtatgacgccgagggacctcacatcaacttctaccagctgaggaacttcctgaagtgctccgaagacaacccgctctttgccggcatcgactgtgaggtgttcgagtcacgcttccccaccaccatggccttgtccgtgctcgtgaccattgaaatgtgcaatgccctcaacagcgtctcggagaaccagtcgctgctgcggatgccgccctggatgaacccctggctgctggtggctgtggccatgtccatggccctgcacttcctcatcctgctcgtgccgcccctgcctctcattttccaggtgaccccactgagcgggcgccagtgggtggtggtgctccagatatctctgcctgtcatcctgctggatgaggccctcaagtacctgtcccggaaccacatgcacgaagaaatgagccagaagtgagcgctgggaacagggtggagtctccggtgtgtacctcagactgatggtgcccatgtgttcgcctccgccccccacccttgccaccacactcgcccacttgcccaccgggtcccgccggataaatgacaggcccgaggtcagaatggccatccccgggccccgtcctggggtctctgtccccacttccttctggcctgggaggtctgtaattcctgtctcctggactctcctgggaagttccctgctctgcagctctggcccaggagctgcaggctgggagggggcagccaagaagccggagctggcagcatacccagagatccggggcccccccacccccaaatcacgagtgcagctggagcttgctcccccttgttcggaagctggacgttcacttggtgactggtgcctctgcactgacggaggactctgggggtccttcttaccggctctgacctctctcttcgtgcctggtctgggactgggtcagccctgggggatcagaaggggccatctgggcccagctgtgtacagcgagggtgggcagccccctccactccactctgcttccacaaagtcggctcccgagagctcgaggctgcttctgtttatatgtgcagggcccgggcgggtgaagggtcagagagacggacacaaggagccggcaggagggcggagcgaggatgtcctttcccgggagacaagtcgggaaagcctggctggactgcctcagccccgcgcgcctcctggactcagggttccccgtcctgagctcgggagatgttcagagtcacactgccgcccggtctgccacgcagaggtccaacttgccacccgcgtccctggtacctgagaccaccgacatcctcaggttcctgaccgtggcgcccttctacccagcccagtgtgcggccgccgcgctgtctgcacagctgggggcctctgagcctggtgggcttcctggactcttggcctcactccttgccccctccccacgacacccatgagccgaaaggatgtcactaaggatggctgattccccaagggcacccgctctccctccctccctgctggaggaacacgtcatatcagatgagaggaagatggcctctgatggacagaatttttctcttaactcagcttttgctactttggcaaaaactagcgaggggtagcagaaacctgcaccaaggattgtccctatgtcttggcccctcctagagcgtgtgcagactgatgattttatatgtaaatcaagactcacatccctttcctagtcccccacatccaaagcccctcagcctgccttgcagaccaatgggctccatgttctgtagccccctcccctacgcctcacccctcctccctctcacaggttctgggcggccagtgagagaaacgcagtgggggaggcagggagtctggtgcctgcagagattctctgcttctttcctggggggaggtggggaggtcttagcaggagcgggccctgtacccacctgctgacctgctgtttggtagagaaataaaggttgtgtgactggggg

SEQ ID NO: 560 - DNA, 1783 bp, Homo sapiens
ctccaccaatgggcgacgcgtacttgcagtggcgcgctgtgtgcgtcacgccgacgacgcgcgaagggcacacatcttaggacccggaggacgtccggcctctgtgagccgcaacctttccaagggagtggttgtgtgatcgccatcttagggaaaagatgttctcgtccgtggcgcacctggcgcgggcgaaccccttcaacacgccacatctgcagctggtgcacgatggtctcggggacctccgcagcagctccccagggcccacgggccagccccgccgccctcgcaacctggcagccgccgccgtggaagagtacagttgtgaatttggctccgcgaagtattatgcactgtgtggctttggtggggtcttaagttgtggtctgacacacactgctgtggttcccctggatttagtgaaatgccgtatgcaggtggacccccaaaagtacaagggcatatttaacggattctcagttacacttaaagaggatggtgttcgtggtttggctaaaggatgggctccgactttccttggctactccatgcagggactctgcaagtttggcttttatgaagtctttaaagtcttgtatagcaatatgcttggagaggagaatacttatctctggcgcacatcactatatttggctgcctctgccagtgctgaattctttgctgacattgccctggctcctatggaagctgctaaggttcgaattcaaacccagccaggttatgccaacactttgagggatgcagctcccaaaatgtataaggaagaaggcctaaaagcattctacaagggggttgctcctctctggatgagacagataccatacaccatgatgaagttcgcctgctttgaacgtactgttgaagcactgtacaagtttgtggttcctaagccccgcagtgaatgttcaaagccagagcagctggttgtaacatttgtagcaggttacatagctggagtcttttgtgcaattgtttctcaccctgctgattctgtggtatctgtgttgaataaagaaaaaggtagcagtgcttctctggtcctcaagagacttggatttaaaggtgtatggaagggactgtttgcccgtatcatcatgattggtaccctgactgcactacagtggtttatctatgactccgtgaaggtctacttcagacttcctcgccctcctccacccgagatgccagagtctctgaagaagaagcttgggttaactcagtagttagatcaaagcaaatgtggactgaatctgcttgttgatcagtgttgaagaaagtgcaaaaggaacttttatatatttgacagtgtaggaaattgtctattcctgatataattactgtagtactcttgcttaaggcaagagtttcagatttactgttgaaataaacccaactcttcatgatttgcctgtgacttatttttaaaacttttttaaaaaagatttagctttaaaatagttggaaagaatgaagtatataagttaaggaaaaaatacaaaactgaccatgaccattgttggttgaatattccagttgctattcagaaattgtcatatgtctcaagttttatcacacaaagttcctgtatttctagggaagcagactttaaatttctaaaaacttgatttaattatagttaaatatgtgtagtcatttgtggttattttggcaagtaaatgtcagtgtatacttacatttttgcagcatgtactacaccttttttatgttggtgagtttgctaatccttatttgtaagacaagg

SEQ ID NO: 561 - DNA, 1983 bp, Homo sapiens
cgctgtgtgcgtcacgccgacgacgcgcgaagggcacacatcttaggacccggaggacgtccggcctctgtgagccgcaacctttccaagggagtggttgtgtgatcgccatcttagggagtgagtgtggccgggccttctcctgtggcgggtgtggggagcggagcccagagctcctgtggggccgctgctttggcggtgggcccagccgggagcagcctctttcgaaggccgccgtgacctcttcaagggcgtggagacgggaaggaaaaggccccggttggggttccagggcgccggtaacgttaaccggcgccttgcctgtcctctaaccgtcgctccctcctcccctagaaagatgttctcgtccgtggcgcacctggcgcgggcgaaccccttcaacacgccacatctgcagctggtgcacgatggtctcggggacctccgcagcagctccccagggcccacgggccagccccgccgccctcgcaacctggcagccgccgccgtggaagagtacagttgtgaatttggctccgcgaagtattatgcactgtgtggctttggtggggtcttaagttgtggtctgacacacactgctgtggttcccctggatttagtgaaatgccgtatgcaggtggacccccaaaagtacaagggcatatttaacggattctcagttacacttaaagaggatggtgttcgtggtttggctaaaggatgggctccgactttccttggctactccatgcagggactctgcaagtttggcttttatgaagtctttaaagtcttgtatagcaatatgcttggagaggagaatacttatctctggcgcacatcactatatttggctgcctctgccagtgctgaattctttgctgacattgccctggctcctatggaagctgctaaggttcgaattcaaacccagccaggttatgccaacactttgagggatgcagctcccaaaatgtataaggaagaaggcctaaaagcattctacaagggggttgctcctctctggatgagacagataccatacaccatgatgaagttcgcctgctttgaacgtactgttgaagcactgtacaagtttgtggttcctaagccccgcagtgaatgttcaaagccagagcagctggttgtaacatttgtagcaggttacatagctggagtcttttgtgcaattgtttctcaccctgctgattctgtggtatctgtgttgaataaagaaaaaggtagcagtgcttctctggtcctcaagagacttggatttaaaggtgtatggaagggactgtttgcccgtatcatcatgattggtaccctgactgcactacagtggtttatctatgactccgtgaaggtctacttcagacttcctcgccctcctccacccgagatgccagagtctctgaagaagaagcttgggttaactcagtagttagatcaaagcaaatgtggactgaatctgcttgttgatcagtgttgaagaaagtgcaaaaggaacttttatatatttgacagtgtaggaaattgtctattcctgatataattactgtagtactcttgcttaaggcaagagtttcagatttactgttgaaataaacccaactcttcatgatttgcctgtgacttatttttaaaacttttttaaaaaagatttagctttaaaatagttggaaagaatgaagtatataagttaaggaaaaaatacaaaactgaccatgaccattgttggttgaatattccagttgctattcagaaattgtcatatgtctcaagttttatcacacaaagttcctgtatttctagggaagcagactttaaatttctaaaaacttgatttaattatagttaaatatgtgtagtcatttgtggttattttggcaagtaaatgtcagtgtatacttacatttttgcagcatgtactacaccttttttatgttggtgagtttgctaatccttatttgtaagacaagg

SEQ ID NO: 562 - DNA, 2200 bp, Homo sapiens
ctccaccaatgggcgacgcgtacttgcagtggcgcgctgtgtgcgtcacgccgacgacgcgcgaagggcacacatcttaggacccggaggacgtccggcctctgtgagccgcaacctttccaagggagtggttgtgtgatcgccatcttagggaaaagatgttctcgtccgtggcgcacctggcgcgggcgaaccccttcaacacgccacatctgcagctggtgcacgatggtctcggggacctccgcagcagctccccagggcccacgggccagccccgccgccctcgcaacctggcagccgccgccgtggaagagtacagttgtgaatttggctccgcgaagtattatgcactgtgtggctttggtggggtcttaagttgtggtctgacacacactgctgtggttcccctggatttagtgaaatgccgtatgcaggtggacccccaaaagtacaagggcatatttaacggattctcagttacacttaaagaggatggtgttcgtggtttggctaaaggatgggctccgactttccttggctactccatgcagggactctgcaagtttggcttttatgaagtctttaaagtcttgtatagcaatatgcttggagaggagaatacttatctctggcgcacatcactatatttggctgcctctgccagtgctgaattctttgctgacattgccctggctcctatggaagctgctaaggttcgaattcaaacccagccaggttatgccaacactttgagggatgcagctcccaaaatgtataaggaagaaggcctaaaagcattctacaagggggttgctcctctctggatgagacagataccatacaccatgatgaagttcgcctgctttgaacgtactgttgaagcactgtacaagtttgtggttcctaagccccgcagtgaatgttcaaagccagagcagctggttgtaacatttgtagcaggttacatagctggagtcttttgtgcaattgtttctcaccctgctgattctgtggtatctgtgttgaataaagaaaaaggtagcagtgcttctctggtcctcaagagacttggatttaaaggtgtatggaagggactgtttgcccgtatcatcatgattggtaccctgactgcactacagtggtttatctatgactccgtgaaggtctacttcagacttcctcgccctcctccacccgagatgccagagtctctgaagaagaagcttgggttaactcagtagttagatcaaagcaaatgtggactgaatctgcttgttgatcagtgttgaagaaagtgcaaaaggaacttttatatatttgacagtgtaggaaattgtctattcctgatataattactgtagtactcttgcttaaggcaagagtttcagatttactgttgaaataaacccaactcttcatgatttgcctgtgacttatttttaaaacttttttaaaaaagatttagctttaaaatagttggaaagaatgaagtatataagttaaggaaaaaatacaaaactgaccatgaccattgttggttgaatattccagttgctattcagaaattgtcatatgtctcaaaaaaaaaaaaaatatatatatatatatatatatgaagctgatagttgaattatgttgattcagggacaagatagcattgcatagtaacttccagtaggatcaaatattttgagagtggttaaaacgccaaggaatcctgattttatgaaattatgccttctgataggtgcaacaaaattgaacagaagagtaacagcttaactaaacctccattgtgtgaaagttttatgaaatgttttgacttttttttttttttccctagagaacagggttcttgctttgtcgcccaggagtttgaggctgcaatgagctacaatcacacccctgcactccggcctgggcgacagagtgataacctgtctaaaaaaataaaaataaattgtataatcatattgcaattttctttgcattactgatgaggaaaaatctcaaagtaattgtaaaaaatcctggatatcacatagttgagaaacaaagttattttaaacttacaggactctgtagttcacagttgaacactgtggcttcctgaaatatcaaagaataatgtacattaataagccagctactatcggcatcttgtaaaaattaaaaaattaaacataaataaaagttc

SEQ ID NO: 563 - DNA, 1786 bp, Homo sapiens
ctccaccaatgggcgacgcgtacttgcagtggcgcgctgtgtgcgtcacgccgacgacgcgcgaagggcacacatcttaggacccggaggacgtccggcctctgtgagccgcaacctttccaagggagtggttgtgtgatcgccatcttagggaaaagatgttctcgtccgtggcgcacctggcgcgggcgaaccccttcaacacgccacatctgcagctggtgcacgatggtctcggggacctccgcagcagctccccagggcccacgggccagccccgccgccctcgcaacctggcagccgccgccgtggaagagcagtatagctgtgactatggatctggcagattctttatcctttgtggacttggaggaattattagctgtggcacaacacatacagcattggttcctctagatctggttaaatgcagaatgcaggtggacccccaaaagtacaagggcatatttaacggattctcagttacacttaaagaggatggtgttcgtggtttggctaaaggatgggctccgactttccttggctactccatgcagggactctgcaagtttggcttttatgaagtctttaaagtcttgtatagcaatatgcttggagaggagaatacttatctctggcgcacatcactatatttggctgcctctgccagtgctgaattctttgctgacattgccctggctcctatggaagctgctaaggttcgaattcaaacccagccaggttatgccaacactttgagggatgcagctcccaaaatgtataaggaagaaggcctaaaagcattctacaagggggttgctcctctctggatgagacagataccatacaccatgatgaagttcgcctgctttgaacgtactgttgaagcactgtacaagtttgtggttcctaagccccgcagtgaatgttcaaagccagagcagctggttgtaacatttgtagcaggttacatagctggagtcttttgtgcaattgtttctcaccctgctgattctgtggtatctgtgttgaataaagaaaaaggtagcagtgcttctctggtcctcaagagacttggatttaaaggtgtatggaagggactgtttgcccgtatcatcatgattggtaccctgactgcactacagtggtttatctatgactccgtgaaggtctacttcagacttcctcgccctcctccacccgagatgccagagtctctgaagaagaagcttgggttaactcagtagttagatcaaagcaaatgtggactgaatctgcttgttgatcagtgttgaagaaagtgcaaaaggaacttttatatatttgacagtgtaggaaattgtctattcctgatataattactgtagtactcttgcttaaggcaagagtttcagatttactgttgaaataaacccaactcttcatgatttgcctgtgacttatttttaaaacttttttaaaaaagatttagctttaaaatagttggaaagaatgaagtatataagttaaggaaaaaatacaaaactgaccatgaccattgttggttgaatattccagttgctattcagaaattgtcatatgtctcaagttttatcacacaaagttcctgtatttctagggaagcagactttaaatttctaaaaacttgatttaattatagttaaatatgtgtagtcatttgtggttattttggcaagtaaatgtcagtgtatacttacatttttgcagcatgtactacaccttttttatgttggtgagtttgctaatccttatttgtaagacaagg

SEQ ID NO: 564 - DNA, 2203 bp, Homo sapiens
ctccaccaatgggcgacgcgtacttgcagtggcgcgctgtgtgcgtcacgccgacgacgcgcgaagggcacacatcttaggacccggaggacgtccggcctctgtgagccgcaacctttccaagggagtggttgtgtgatcgccatcttagggaaaagatgttctcgtccgtggcgcacctggcgcgggcgaaccccttcaacacgccacatctgcagctggtgcacgatggtctcggggacctccgcagcagctccccagggcccacgggccagccccgccgccctcgcaacctggcagccgccgccgtggaagagcagtatagctgtgactatggatctggcagattctttatcctttgtggacttggaggaattattagctgtggcacaacacatacagcattggttcctctagatctggttaaatgcagaatgcaggtggacccccaaaagtacaagggcatatttaacggattctcagttacacttaaagaggatggtgttcgtggtttggctaaaggatgggctccgactttccttggctactccatgcagggactctgcaagtttggcttttatgaagtctttaaagtcttgtatagcaatatgcttggagaggagaatacttatctctggcgcacatcactatatttggctgcctctgccagtgctgaattctttgctgacattgccctggctcctatggaagctgctaaggttcgaattcaaacccagccaggttatgccaacactttgagggatgcagctcccaaaatgtataaggaagaaggcctaaaagcattctacaagggggttgctcctctctggatgagacagataccatacaccatgatgaagttcgcctgctttgaacgtactgttgaagcactgtacaagtttgtggttcctaagccccgcagtgaatgttcaaagccagagcagctggttgtaacatttgtagcaggttacatagctggagtcttttgtgcaattgtttctcaccctgctgattctgtggtatctgtgttgaataaagaaaaaggtagcagtgcttctctggtcctcaagagacttggatttaaaggtgtatggaagggactgtttgcccgtatcatcatgattggtaccctgactgcactacagtggtttatctatgactccgtgaaggtctacttcagacttcctcgccctcctccacccgagatgccagagtctctgaagaagaagcttgggttaactcagtagttagatcaaagcaaatgtggactgaatctgcttgttgatcagtgttgaagaaagtgcaaaaggaacttttatatatttgacagtgtaggaaattgtctattcctgatataattactgtagtactcttgcttaaggcaagagtttcagatttactgttgaaataaacccaactcttcatgatttgcctgtgacttatttttaaaacttttttaaaaaagatttagctttaaaatagttggaaagaatgaagtatataagttaaggaaaaaatacaaaactgaccatgaccattgttggttgaatattccagttgctattcagaaattgtcatatgtctcaaaaaaaaaaaaaatatatatatatatatatatatgaagctgatagttgaattatgttgattcagggacaagatagcattgcatagtaacttccagtaggatcaaatattttgagagtggttaaaacgccaaggaatcctgattttatgaaattatgccttctgataggtgcaacaaaattgaacagaagagtaacagcttaactaaacctccattgtgtgaaagttttatgaaatgttttgacttttttttttttttccctagagaacagggttcttgctttgtcgcccaggagtttgaggctgcaatgagctacaatcacacccctgcactccggcctgggcgacagagtgataacctgtctaaaaaaataaaaataaattgtataatcatattgcaattttctttgcattactgatgaggaaaaatctcaaagtaattgtaaaaaatcctggatatcacatagttgagaaacaaagttattttaaacttacaggactctgtagttcacagttgaacactgtggcttcctgaaatatcaaagaataatgtacattaataagccagctactatcggcatcttgtaaaaattaaaaaattaaacataaataaaagttc

SEQ ID NO: 565 - DNA, 1960 bp, Homo sapiens
cgctgtgtgcgtcacgccgacgacgcgcgaagggcacacatcttaggacccggaggacgtccggcctctgtgagccgcaacctttccaagggagtggttgtgtgatcgccatcttagggagtgagtgtggccgggccttctcctgtggcgggtgtggggagcggagcccagagctcctgtggggccgctgctttggcggtgggcccagccgggagcagcctctttcgaaggccgccgtgacctcttcaagggcgtggagacgggaaggaaaaggccccggttggggttccagggcgccggtaacgttaaccggcgccttgcctgtcctctaaccgtcgctccctcctcccctagaaagatgttctcgtccgtggcgcacctggcgcgggcgaaccccttcaacacgccacatctgcagctggtgcacgatggtctcggggacctccgcagcagctccccagggcccacgggccagccccgccgccctcgcaacctggcagccgccgccgtggaagagtacagttgtgaatttggctccgcgaagtattatgcactgtgtggctttggtggggtcttaagttgtggtctgacacacactgctgtggttcccctgggtggacccccaaaagtacaagggcatatttaacggattctcagttacacttaaagaggatggtgttcgtggtttggctaaaggatgggctccgactttccttggctactccatgcagggactctgcaagtttggcttttatgaagtctttaaagtcttgtatagcaatatgcttggagaggagaatacttatctctggcgcacatcactatatttggctgcctctgccagtgctgaattctttgctgacattgccctggctcctatggaagctgctaaggttcgaattcaaacccagccaggttatgccaacactttgagggatgcagctcccaaaatgtataaggaagaaggcctaaaagcattctacaagggggttgctcctctctggatgagacagataccatacaccatgatgaagttcgcctgctttgaacgtactgttgaagcactgtacaagtttgtggttcctaagccccgcagtgaatgttcaaagccagagcagctggttgtaacatttgtagcaggttacatagctggagtcttttgtgcaattgtttctcaccctgctgattctgtggtatctgtgttgaataaagaaaaaggtagcagtgcttctctggtcctcaagagacttggatttaaaggtgtatggaagggactgtttgcccgtatcatcatgattggtaccctgactgcactacagtggtttatctatgactccgtgaaggtctacttcagacttcctcgccctcctccacccgagatgccagagtctctgaagaagaagcttgggttaactcagtagttagatcaaagcaaatgtggactgaatctgcttgttgatcagtgttgaagaaagtgcaaaaggaacttttatatatttgacagtgtaggaaattgtctattcctgatataattactgtagtactcttgcttaaggcaagagtttcagatttactgttgaaataaacccaactcttcatgatttgcctgtgacttatttttaaaacttttttaaaaaagatttagctttaaaatagttggaaagaatgaagtatataagttaaggaaaaaatacaaaactgaccatgaccattgttggttgaatattccagttgctattcagaaattgtcatatgtctcaagttttatcacacaaagttcctgtatttctagggaagcagactttaaatttctaaaaacttgatttaattatagttaaatatgtgtagtcatttgtggttattttggcaagtaaatgtcagtgtatacttacatttttgcagcatgtactacaccttttttatgttggtgagtttgctaatccttatttgtaagacaagg

SEQ ID NO: 566 - DNA, 2526 bp, Homo sapiens
cagcacagcgttggtgctgcctgggtatcagaaagcaagctcacattgctctccagtacgtgtaagccttttcttttcaagatgcctgaggaagtgcaccatggagaggaggaggtggagacttttgcctttcaggcagaaattgcccaactcatatccctcatcatcaataccttctattccaacgaggagattttccttcaggagttgatctctaatgcttctgatgccttggacaagattcgctatgagagcctgacagacccttcaaagttggacagtggtaaagagctgaaaattgacatcatccccaaccctcaggaacgtaccctggctttggtagacacaggcattggcatgaccaaagctgatctcataaataatttgagaaccattgccaagtctggtactaaagcatgcatggaggctcttcaggctggtgcagacatctccatgattgggcagtttggtgttggcttttttctgcctacctggtggcagagaaactggttgtgatcacaaagcacaacgatgatgaacagtatgcttgggagtcttctgctggaggttccttcactgtgcatgctgaccatggtgagcccattggcaggggtaccaaagtgatcctccatcttaaagaagatcagacagagtacttagaagagaggcgggtcaaagaagtagtgaagaagcattctcagttcataggctatcccatcaccctttatttggagaaggaacaagacaaggaaattagtgatgatgaggcagaagaagagaaaggtgagaaagaagaggaagataaagatgacgaagaaaagcccaagatcaaagatgtgggttcagatgaggaggatgacagcagtaaggataagaagaagaaaactaagaagatcaaagagaaatacattgactaggaagaactaaacaagaccaagcctatttggaccagaaaccatgatgacatcacccaagaggagtatggagaattctataagagcctcaccagtgactgggaagaccacttggcagtcaagcacttttctgtagaaggtcagttggaattcagggcattgctattcagtcctcgtcgggctccctttgacctttttgagaacaagaagaaaaagaacaacatcaaactgtatgtccgccgtgtgttcatcatggacagctgtgatgagttgataccagagtatctcaattttatccatggtgtggttgactctgaggatctgcccctgaacatctcccgagaaatgctccagcagagcaaaatcttgaaagtcattcgcaaaaacattgttaagaagtgccttgagctcttctctgagctggcagaagacaaggagattataagaaattctatgaggcattttctaaaaatctcaagcttggaatccacgaagactccactaaccgccaccgcctgtctgagctgctgcgctgtcacacctcccagtctggagatgagatgacatctctgtcgtagtatgtttctcacatgaaggagacacagaagtccacctattacatcactggtgagagcaaagagcaggtggccaactctgcttttgtggagcgagtgcggaaacagggcttcgaggtggtatatatgactgagcccattgacgagtactgtgtgcagcagctcaaggagtttgatgggaaaagcctggtctcagttaccaaggagggtctggagctacctgaggatgaggaggagaagaagaagatggaagaaagcaaggaaaagtttgagaacctctgcaagctcatgaaagaaatcttagataagaaggttgagaaggtgacaatctccaatagacttgtgtcttcaccctgctgcattgtgaccagcacctacggctggacagccaatatggagcagatcatgaaagcccaggcacttcgggacaactccaccatgggctatatgatggccaaaaagcacctggagatcaaccccgaccaccccatcatggagacgctgcggcagaaggctgaggccgacaagaatgataaggcagttaaggacctggtggtgctgctgtttgaaaccgccctgctatcttcgggcttttcccttgaggatccccagacccactccaaccacatctaccacatgatcaagctaggtctaggtactgatgaagatgaagtggcagcagaggaacccagtgatgcagttcctgatgagatcccccctcttgagggtgatgaggatgcgtctcgcatggaagaagtcgattaggagttcatagttggaaaacttgtgcccttgtatagtgtccccatggctcccactgcagcctcgagtgcccctgtcccacctggctgctggtgtctagtgtttttttccctctcctgtccttgtgttgaaggcaggaaaccaagggtgtcaagccccattccctctctactcttgacagcaggattggatgttgtgtattgtggtttattttattttcttcattttgttctgaaattaaagaatgtaaaataaagaatatgccgtttttatac

SEQ ID NO: 567 - DNA, 3718 bp, Homo sapiens
ccccgcagccctcccgggacacggtggacacgcttgtcccagacctgggcgccctcctgccgggagccaggactggccgcagcaggcgctgtccgggcccgtgggcggggtttcgggagggggcggagccaggcccacggccggtgtcaggttgctccggtaacggtgacgtttcgcggcgtgggcggggccagcacgcaggttgcatattttaggaagtgaggaggaggcgcgggctggagctgcggcggggtctggggcgcagagcagcggcgggaggaggcggacacgtggcaacagcggtagcagcccgggcggcggcagcaacagcggcggcggcatcggcccgagccgccggccgccctcccaccctcccgccccgcggcagccctagctccctccacttggctcccctggtcccgctcgctcggccgggagctgctctgtgcttttctctctgattctccagcgacaggacccggcgccgggcactgagcaccgccaccatggggaagggggttggacgtgataagtatgagcctgcagctgtttcagaacaaggtgataaaaagggcaaaaagggcaaaaaagacagggacatggatgaactgaagaaagaagtttctatggatgatcataaacttagccttgatgaacttcatcgtaaatatggaacagacttgagccggggattaacatctgctcgtgcagctgagatcctggcgcgagatggtcccaacgccctcactccccctcccactactcctgaatggatcaagttttgtcggcagctctttggggggttctcaatgttactgtggattggagcgattctttgtttcttggcttatagcatccaagctgctacagaagaggaacctcaaaacgataatctgtacctgggtgtggtgctatcagccgttgtaatcataactggttgcttctcctactatcaagaagctaaaagttcaaagatcatggaatccttcaaaaacatggtccctcagcaagcccttgtgattcgaaatggtgagaaaatgagcataaatgcggaggaagttgtggttggggatctggtggaagtaaaaggaggagaccgaattcctgctgacctcagaatcatatctgcaaatggctgcaaggtggataactcctcgctcactggtgaatcagaaccccagactaggtctccagatttcacaaatgaaaaccccctggagacgaggaacattgccttcttttcaaccaattgtgttgaaggcaccgcacgtggtattgttgtctacactggggatcgcactgtgatgggaagaattgccacacttgcttctgggctggaaggaggccagacccccattgctgcagaaattgaacattttatccacatcatcacgggtgtggctgtgttcctgggtgtgtctttcttcatcctttctctcatccttgagtacacctggcttgaggctgtcatcttcctcatcggtatcatcgtagccaatgtgccggaaggtttgctggccactgtcacggtctgtctgacacttactgccaaacgcatggcaaggaaaaactgcttagtgaagaacttagaagctgtggagaccttggggtccacgtccaccatctgctctgataaaactggaactctgactcagaaccggatgacagtggcccacatgtggtttgacaatcaaatccatgaagctgatacgacagagaatcagagtggtgtctcttttgacaagacttcagctacctggcttgctctgtccagaattgcaggtctttgtaacagggcagtgtttcaggctaaccaggaaaacctacctattcttaagcgggcagttgcaggagatgcctctgagtcagcactcttaaagtgcatagagctgtgctgtggttccgtgaaggagatgagagaaagatacgccaaaatcgtcgagatacccttcaactccaccaacaagtaccagttgtctattcataagaaccccaacacatcggagccccaacacctgttggtgatgaagggcgccccagaaaggatcctagaccgttgcagctctatcctcctccacggcaaggagcagcccctggatgaggagctgaaagacgcctttcagaacgcctatttggagctggggggcctcggagaacgagtcctaggtttctgccacctctttctgccagatgaacagtttcctgaagggttccagtttgacactgacgatgtgaatttccctatcgataatctgtgctttgttgggctcatctccatgattgaccctccacgggcggccgttcctgatgccgtgggcaaatgtcgaagtgctggaattaaggtcatcatggtcacaggagaccatccaatcacagctaaagctattgccaaaggtgtgggcatcatctcagaaggcaatgagaccacctatgagcagaggaaaatcgtggagttcacctgccacacagccttcttcgtcagtatcgtggtggtgcagtgggccgacttggtcatctgtaagaccaggaggaattcggtcttccagcaggggatgaagaacaagatcttgatatttggcctctttgaagagacagccctggctgctttcctttcctactgccctggaatgggtgttgctcttaggatgtatcccctcaaacctacctggtggttctgtgccttcccctactctcttctcatcttcgtatatgacgaagtcagaaaactcatcatcaggcgacgccctggcggctgggtggagaaggaaacctactattagccccccgtcctgcacgccgtggagcatcaggccacacactctgcatccgacacccaccccctctttgtgtacttcagtcttggagtttggaactctaccctggtaggaaagcaccgcagcatgtggggaagcaagacgtcctggaatgaagcatgtagctctatggggggaggggggagggctgcctgaaaaccatccatctgtggaaatgacagcggggaaggtttttatgtgcctttttgtttttgtaaaaaaggaacacccggaaagactgaaagaatacattttatatctggatttttacaaataaagatggctattataatggaatttgtctgtgccctcgtcgcttctttggtacagatgtctatgtgatctggagctgtggttttcaacatgagtccctgaccagcagtttatcagcatcacctggttgcttgctaggaaggcgggcccagacccactgagtcagaaatgcatcagcaatgtggcttaataagccctcaggtgattttgatttacattcaagtttggaaaccactggctaagaggaagcattctgcccgtgctcttttagttggagtaggtgagtttacctgacccattttttctggctgctgcctggggtgatagggctgtaactccacctgctgccttagcatctggctttttgatggaagagcacctcgcctaaaggatttccagaccctcagagtatactaaactgcagatgaggcccttctctttcagtctaaaagagacctgaagccttcctgctttccctccagagatcaccaccacatctcaagtgtctctagcccagggcttatctgagaagcagaaatctatcccacacagtctgcctgggcatgtgtgctgagaagtggttcccttccttccatataatgtgttcctaatttagcatcaatgacacaatt

SEQ ID NO: 568 - DNA, 2857 bp, Homo sapiens
ccccgcagccctcccgggacacggtggacacgcttgtcccagacctgggcgccctcctgccgggagccaggactggccgcagcaggcgctgtccgggcccgtgggcggggtttcgggagggggcggagccaggcccacggccggtgtcaggttgctccggtaacggtgacgtttcgcggcgtgggcggggccagcacgcaggttgcatattttaggaagtgaggaggaggcgcgggctggagctgcggcggggtctggggcgcagagcagcggcgggaggaggcggacacgtggcaacagcggtagcagcccgggcggcggcagcaacagcggcggcggcatcggcccgagccgccggccgccctcccaccctcccgccccgcggcagccctagctccctccacttggctcccctggtcccgctcgctcggccgggagctgctctgtgcttttctctctgattctccagcgacaggacccggcgccgggcactgagcaccgccaccatggggaagggggttggacgtgataagtatgagcctgcagctgtttcagaacaaggtgataaaaagggcaaaaagggcaaaaaagacagggacatggatgaactgaagaaagaagtttctatggatgatcataaacttagccttgatgaacttcatcgtaaatatggaacagacttgagccggggattaacatctgctcgtgcagctgagatcctggcgcgagatggtcccaacgccctcactccccctcccactactcctgaatggatcaagttttgtcggcagctctttggggggttctcaatgttactgtggattggagcgattctttgtttcttggcttatagcatccaagctgctacagaagaggaacctcaaaacgataatctgtacctgggtgtggtgctatcagccgttgtaatcataactggttgcttctcctactatcaagaagctaaaagttcaaagatcatggaatccttcaaaaacatggtccctcagcaagcccttgtgattcgaaatggtgagaaaatgagcataaatgcggaggaagttgtggttggggatctggtggaagtaaaaggaggagaccgaattcctgctgacctcagaatcatatctgcaaatggctgcaaggtggataactcctcgctcactggtgaatcagaaccccagactaggtctccagatttcacaaatgaaaaccccctggagacgaggaacattgccttcttttcaaccaattgtgttgaaggcaccgcacgtggtattgttgtctacactggggatcgcactgtgatgggaagaattgccacacttgcttctgggctggaaggaggccagacccccattgctgcagaaattgaacattttatccacatcatcacgggtgtggctgtgttcctgggtgtgtctttcttcatcctttctctcatccttgagtacacctggcttgaggctgtcatcttcctcatcggtatcatcgtagccaatgtgccggaaggtttgctggccactgtcacggtctgtctgacacttactgccaaacgcatggcaaggaaaaactgcttagtgaagaacttagaagctgtggagaccttggggtccacgtccaccatctgctctgataaaactggaactctgactcagaaccggatgacagtggcccacatgtggtttgacaatcaaatccatgaagctgatacgacagagaatcagagtggtgtctcttttgacaagacttcagctacctggcttgctctgtccagaattgcaggtctttgtaacagggcagtgtttcaggctaaccaggaaaacctaccttctcttctcatcttcgtatatgacgaagtcagaaaactcatcatcaggcgacgccctggcggctgggtggagaaggaaacctactattagccccccgtcctgcacgccgtggagcatcaggccacacactctgcatccgacacccaccccctctttgtgtacttcagtcttggagtttggaactctaccctggtaggaaagcaccgcagcatgtggggaagcaagacgtcctggaatgaagcatgtagctctatggggggaggggggagggctgcctgaaaaccatccatctgtggaaatgacagcggggaaggtttttatgtgcctttttgtttttgtaaaaaaggaacacccggaaagactgaaagaatacattttatatctggatttttacaaataaagatggctattataatggaatttgtctgtgccctcgtcgcttctttggtacagatgtctatgtgatctggagctgtggttttcaacatgagtccctgaccagcagtttatcagcatcacctggttgcttgctaggaaggcgggcccagacccactgagtcagaaatgcatcagcaatgtggcttaataagccctcaggtgattttgatttacattcaagtttggaaaccactggctaagaggaagcattctgcccgtgctcttttagttggagtaggtgagtttacctgacccattttttctggctgctgcctggggtgatagggctgtaactccacctgctgccttagcatctggctttttgatggaagagcacctcgcctaaaggatttccagaccctcagagtatactaaactgcagatgaggcccttctctttcagtctaaaagagacctgaagccttcctgctttccctccagagatcaccaccacatctcaagtgtctctagcccagggcttatctgagaagcagaaatctatcccacacagtctgcctgggcatgtgtgctgagaagtggttcccttccttccatataatgtgttcctaatttagcatcaatgacacaatt

SEQ ID NO: 569 - DNA, 3634 bp, Homo sapiens
ccccgcagccctcccgggacacggtggacacgcttgtcccagacctgggcgccctcctgccgggagccaggactggccgcagcaggcgctgtccgggcccgtgggcggggtttcgggagggggcggagccaggcccacggccggtgtcaggttgctccggtaacggtgacgtttcgcggcgtgggcggggccagcacgcaggttgcatattttaggaagtgaggaggaggcgcgggctggagctgcggcggggtctggggcgcagagcagcggcgggaggaggcggacacgtggcaacagcggtagcagcccgggcggcggcagcaacagcggcggcggcatcggcccgagccgccggccgccctcccaccctcccgccccgcggcagccctagctccctccacttggctcccctggtcccgctcgctcggccgggagctgctctgtgcttttctctctgattctccagcgacaggacccggcgccgggcactgagcaccgccaccatggggaagggggttggacgtgataagtatgagcctgcagctgtttcagaacaaggtgataaaaagggcaaaaagggcaaaaaagacagggacatggatgaactgaagaaagaagtttctatggatgatcataaacttagccttgatgaacttcatcgtaaatatggaacagacttgagccggggattaacatctgctcgtgcagctgagatcctggcgcgagatggtcccaacgccctcactccccctcccactactcctgaatggatcaagttttgtcggcagctctttggggggttctcaatgttactgtggattggagcgattctttgtttcttggcttatagcatccaagctgctacagaagaggaacctcaaaacgataatctgtacctgggtgtggtgctatcagccgttgtaatcataactggttgcttctcctactatcaagaagctaaaagttcaaagatcatggaatccttcaaaaacatggtccctcagcaagcccttgtgattcgaaatggtgagaaaatgagcataaatgcggaggaagttgtggttggggatctggtggaagtaaaaggaggagaccgaattcctgctgacctcagaatcatatctgcaaatggctgcaaggtggataactcctcgctcactggtgaatcagaaccccagactaggtctccagatttcacaaatgaaaaccccctggagacgaggaacattgccttcttttcaaccaattgtgttgaaggcaccgcacgtggtattgttgtctacactggggatcgcactgtgatgggaagaattgccacacttgcttctgggctggaaggaggccagacccccattgctgcagaaattgaacattttatccacatcatcacgggtgtggctgtgttcctgggtgtgtctttcttcatcctttctctcatccttgagtacacctggcttgaggctgtcatcttcctcatcggtatcatcgtagccaatgtgccggaaggtttgctggccactgtcacggtctgtctgacacttactgccaaacgcatggcaaggaaaaactgcttagtgaagaacttagaagctgtggagaccttggggtccacgtccaccatctgctctgataaaactggaactctgactcagaaccggatgacagtggcccacatgtggtttgacaatcaaatccatgaagctgatacgacagagaatcagagtggtgtctcttttgacaagacttcagctacctggcttgctctgtccagaattgcaggtctttgtaacagggcagtgtttcaggctaaccaggaaaacctacctattcttaagcgggcagttgcaggagatgcctctgagtcagcactcttaaagtgcatagagctgtgctgtggttccgtgaaggagatgagagaaagatacgccaaaatcgtcgagatacccttcaactccaccaacaagtaccagttgtctattcataagaaccccaacacatcggagccccaacacctgttggtgatgaagggcgccccagaaaggatcctagaccgttgcagctctatcctcctccacggcaaggagcagcccctggatgaggagctgaaagacgcctttcagaacgcctatttggagctggggggcctcggagaacgagtcctaggtttctgccacctctttctgccagatgaacagtttcctgaagggttccagtttgacactgacgatgtgaatttccctatcgataatctgtgctttgttgggctcatctccatgattgaccctccacgggcggccgttcctgatgccgtgggcaaatgtcgaagtgctggaattaagacctatgagcagaggaaaatcgtggagttcacctgccacacagccttcttcgtcagtatcgtggtggtgcagtgggccgacttggtcatctgtaagaccaggaggaattcggtcttccagcaggggatgaagaacaagatcttgatatttggcctctttgaagagacagccctggctgctttcctttcctactgccctggaatgggtgttgctcttaggatgtatcccctcaaacctacctggtggttctgtgccttcccctactctcttctcatcttcgtatatgacgaagtcagaaaactcatcatcaggcgacgccctggcggctgggtggagaaggaaacctactattagccccccgtcctgcacgccgtggagcatcaggccacacactctgcatccgacacccaccccctctttgtgtacttcagtcttggagtttggaactctaccctggtaggaaagcaccgcagcatgtggggaagcaagacgtcctggaatgaagcatgtagctctatggggggaggggggagggctgcctgaaaaccatccatctgtggaaatgacagcggggaaggtttttatgtgcctttttgtttttgtaaaaaaggaacacccggaaagactgaaagaatacattttatatctggatttttacaaataaagatggctattataatggaatttgtctgtgccctcgtcgcttctttggtacagatgtctatgtgatctggagctgtggttttcaacatgagtccctgaccagcagtttatcagcatcacctggttgcttgctaggaaggcgggcccagacccactgagtcagaaatgcatcagcaatgtggcttaataagccctcaggtgattttgatttacattcaagtttggaaaccactggctaagaggaagcattctgcccgtgctcttttagttggagtaggtgagtttacctgacccattttttctggctgctgcctggggtgatagggctgtaactccacctgctgccttagcatctggctttttgatggaagagcacctcgcctaaaggatttccagaccctcagagtatactaaactgcagatgaggcccttctctttcagtctaaaagagacctgaagccttcctgctttccctccagagatcaccaccacatctcaagtgtctctagcccagggcttatctgagaagcagaaatctatcccacacagtctgcctgggcatgtgtgctgagaagtggttcccttccttccatataatgtgttcctaatttagcatcaatgacacaatt

SEQ ID NO: 570 - DNA, 4212 bp, Homo sapiens
caagcgcccggggaggccatccgcaggtgggcgcggggcctggattccacagaggggcggagtccctcagtcaggcgctggctgcaatcacacccgagcgccagccccctccagcatccctgagtcccagaggagatcgccgaagcgctggaaaagccgttccgcccacgacttctggtgccgggtcggcggcgactgggggagcccagttccgagaccgtaccgcacccactgcggacctcctgggccctacatagttggacgtgataagtatgagcctgcagctgtttcagaacaaggtgataaaaagggcaaaaagggcaaaaaagacagggacatggatgaactgaagaaagaagtttctatggatgatcataaacttagccttgatgaacttcatcgtaaatatggaacagacttgagccggggattaacatctgctcgtgcagctgagatcctggcgcgagatggtcccaacgccctcactccccctcccactactcctgaatggatcaagttttgtcggcagctctttggggggttctcaatgttactgtggattggagcgattctttgtttcttggcttatagcatccaagctgctacagaagaggaacctcaaaacgataatctgtacctgggtgtggtgctatcagccgttgtaatcataactggttgcttctcctactatcaagaagctaaaagttcaaagatcatggaatccttcaaaaacatggtccctcagcaagcccttgtgattcgaaatggtgagaaaatgagcataaatgcggaggaagttgtggttggggatctggtggaagtaaaaggaggagaccgaattcctgctgacctcagaatcatatctgcaaatggctgcaaggtggataactcctcgctcactggtgaatcagaaccccagactaggtctccagatttcacaaatgaaaaccccctggagacgaggaacattgccttcttttcaaccaattgtgttgaaggcaccgcacgtggtattgttgtctacactggggatcgcactgtgatgggaagaattgccacacttgcttctgggctggaaggaggccagacccccattgctgcagaaattgaacattttatccacatcatcacgggtgtggctgtgttcctgggtgtgtctttcttcatcctttctctcatccttgagtacacctggcttgaggctgtcatcttcctcatcggtatcatcgtagccaatgtgccggaaggtttgctggccactgtcacggtctgtctgacacttactgccaaacgcatggcaaggaaaaactgcttagtgaagaacttagaagctgtggagaccttggggtccacgtccaccatctgctctgataaaactggaactctgactcagaaccggatgacagtggcccacatgtggtttgacaatcaaatccatgaagctgatacgacagagaatcagagtggtgtctcttttgacaagacttcagctacctggcttgctctgtccagaattgcaggtctttgtaacagggcagtgtttcaggctaaccaggaaaacctacctattcttaagcgggcagttgcaggagatgcctctgagtcagcactcttaaagtgcatagagctgtgctgtggttccgtgaaggagatgagagaaagatacgccaaaatcgtcgagatacccttcaactccaccaacaagtaccagttgtctattcataagaaccccaacacatcggagccccaacacctgttggtgatgaagggcgccccagaaaggatcctagaccgttgcagctctatcctcctccacggcaaggagcagcccctggatgaggagctgaaagacgcctttcagaacgcctatttggagctggggggcctcggagaacgagtcctaggtttctgccacctctttctgccagatgaacagtttcctgaagggttccagtttgacactgacgatgtgaatttccctatcgataatctgtgctttgttgggctcatctccatgattgaccctccacgggcggccgttcctgatgccgtgggcaaatgtcgaagtgctggaattaaggtcatcatggtcacaggagaccatccaatcacagctaaagctattgccaaaggtgtgggcatcatctcagaaggcaatgagaccgtggaagacattgctgcccgcctcaacatcccagtcagccaggtgaaccccagggatgccaaggcctgcgtagtacacggcagtgatctaaaggacatgacctccgagcagctggatgacattttgaagtaccacactgagatagtgtttgccaggacctcccctcagcagaagctcatcattgtggaaggctgccaaagacagggtgctatcgtggctgtgactggtgacggtgtgaatgactctccagctttgaagaaagcagacattggggttgctatggggattgctggctcagatgtgtccaagcaagctgctgacatgattcttctggatgacaactttgcctcaattgtgactggagtagaggaaggtcgtctgatctttgataacttgaagaaatccattgcttataccttaaccagtaacattcccgagatcaccccgttcctgatatttattattgcaaacattccactaccactggggactgtcaccatcctctgcattgacttgggcactgacatggttcctgccatctccctggcttatgagcaggctgagagtgacatcatgaagagacagcccagaaatcccaaaacagacaaacttgtgaatgagcggctgatcagcatggcctatgggcagattggaatgatccaggccctgggaggcttctttacttactttgtgattctggctgagaacggcttcctcccaattcacctgttgggcctccgagtggactgggatgaccgctggatcaacgatgtggaagacagctacgggcagcagtggacctatgagcagaggaaaatcgtggagttcacctgccacacagccttcttcgtcagtatcgtggtggtgcagtgggccgacttggtcatctgtaagaccaggaggaattcggtcttccagcaggggatgaagaacaagatcttgatatttggcctctttgaagagacagccctggctgctttcctttcctactgccctggaatgggtgttgctcttaggatgtatcccctcaaacctacctggtggttctgtgccttcccctactctcttctcatcttcgtatatgacgaagtcagaaaactcatcatcaggcgacgccctggcggctgggtggagaaggaaacctactattagccccccgtcctgcacgccgtggagcatcaggccacacactctgcatccgacacccaccccctctttgtgtacttcagtcttggagtttggaactctaccctggtaggaaagcaccgcagcatgtggggaagcaagacggctgcctgaaaaccatccatctgtggaaatgacagcggggaaggtttttatgtgcctttttgtttttgtaaaaaaggaacacccggaaagactgaaagaatacattttatatctggatttttacaaataaagatggctattataatggaatttgtctgtgccctcgtcgcttctttggtacagatgtctatgtgatctggagctgtggttttcaacatgagtccctgaccagcagtttatcagcatcacctggttgcttgctaggaaggcgggcccagacccactgagtcagaaatgcatcagcaatgtggcttaataagccctcaggtgattttgatttacattcaagtttggaaaccactggctaagaggaagcattctgcccgtgctcttttagttggagtaggtgagtttacctgacccattttttctggctgctgcctggggtgatagggctgtaactccacctgctgccttagcatctggctttttgatggaagagcacctcgcctaaaggatttccagaccctcagagtatactaaactgcagatgaggcccttctctttcagtctaaaagagacctgaagccttcctgctttccctccagagatcaccaccacatctcaagtgtctctagcccagggcttatctgagaagcagaaatctatcccacacagtctgcctgggcatgtgtgctgagaagtggttcccttccttccatataatgtgttcctaatttagcatcaatgacacaatt

SEQ ID NO: 571 - DNA, 4516 bp, Homo sapiens
ccccgcagccctcccgggacacggtggacacgcttgtcccagacctgggcgccctcctgccgggagccaggactggccgcagcaggcgctgtccgggcccgtgggcggggtttcgggagggggcggagccaggcccacggccggtgtcaggttgctccggtaacggtgacgtttcgcggcgtgggcggggccagcacgcaggttgcatattttaggaagtgaggaggaggcgcgggctggagctgcggcggggtctggggcgcagagcagcggcgggaggaggcggacacgtggcaacagcggtagcagcccgggcggcggcagcaacagcggcggcggcatcggcccgagccgccggccgccctcccaccctcccgccccgcggcagccctagctccctccacttggctcccctggtcccgctcgctcggccgggagctgctctgtgcttttctctctgattctccagcgacaggacccggcgccgggcactgagcaccgccaccatggggaagggggttggacgtgataagtatgagcctgcagctgtttcagaacaaggtgataaaaagggcaaaaagggcaaaaaagacagggacatggatgaactgaagaaagaagtttctatggatgatcataaacttagccttgatgaacttcatcgtaaatatggaacagacttgagccggggattaacatctgctcgtgcagctgagatcctggcgcgagatggtcccaacgccctcactccccctcccactactcctgaatggatcaagttttgtcggcagctctttggggggttctcaatgttactgtggattggagcgattctttgtttcttggcttatagcatccaagctgctacagaagaggaacctcaaaacgataatctgtacctgggtgtggtgctatcagccgttgtaatcataactggttgcttctcctactatcaagaagctaaaagttcaaagatcatggaatccttcaaaaacatggtccctcagcaagcccttgtgattcgaaatggtgagaaaatgagcataaatgcggaggaagttgtggttggggatctggtggaagtaaaaggaggagaccgaattcctgctgacctcagaatcatatctgcaaatggctgcaaggtggataactcctcgctcactggtgaatcagaaccccagactaggtctccagatttcacaaatgaaaaccccctggagacgaggaacattgccttcttttcaaccaattgtgttgaaggcaccgcacgtggtattgttgtctacactggggatcgcactgtgatgggaagaattgccacacttgcttctgggctggaaggaggccagacccccattgctgcagaaattgaacattttatccacatcatcacgggtgtggctgtgttcctgggtgtgtctttcttcatcctttctctcatccttgagtacacctggcttgaggctgtcatcttcctcatcggtatcatcgtagccaatgtgccggaaggtttgctggccactgtcacggtctgtctgacacttactgccaaacgcatggcaaggaaaaactgcttagtgaagaacttagaagctgtggagaccttggggtccacgtccaccatctgctctgataaaactggaactctgactcagaaccggatgacagtggcccacatgtggtttgacaatcaaatccatgaagctgatacgacagagaatcagagtggtgtctcttttgacaagacttcagctacctggcttgctctgtccagaattgcaggtctttgtaacagggcagtgtttcaggctaaccaggaaaacctacctattcttaagcgggcagttgcaggagatgcctctgagtcagcactcttaaagtgcatagagctgtgctgtggttccgtgaaggagatgagagaaagatacgccaaaatcgtcgagatacccttcaactccaccaacaagtaccagttgtctattcataagaaccccaacacatcggagccccaacacctgttggtgatgaagggcgccccagaaaggatcctagaccgttgcagctctatcctcctccacggcaaggagcagcccctggatgaggagctgaaagacgcctttcagaacgcctatttggagctggggggcctcggagaacgagtcctaggtttctgccacctctttctgccagatgaacagtttcctgaagggttccagtttgacactgacgatgtgaatttccctatcgataatctgtgctttgttgggctcatctccatgattgaccctccacgggcggccgttcctgatgccgtgggcaaatgtcgaagtgctggaattaaggtcatcatggtcacaggagaccatccaatcacagctaaagctattgccaaaggtgtgggcatcatctcagaaggcaatgagaccgtggaagacattgctgcccgcctcaacatcccagtcagccaggtgaaccccagggatgccaaggcctgcgtagtacacggcagtgatctaaaggacatgacctccgagcagctggatgacattttgaagtaccacactgagatagtgtttgccaggacctcccctcagcagaagctcatcattgtggaaggctgccaaagacagggtgctatcgtggctgtgactggtgacggtgtgaatgactctccagctttgaagaaagcagacattggggttgctatggggattgctggctcagatgtgtccaagcaagctgctgacatgattcttctggatgacaactttgcctcaattgtgactggagtagaggaaggtcgtctgatctttgataacttgaagaaatccattgcttataccttaaccagtaacattcccgagatcaccccgttcctgatatttattattgcaaacattccactaccactggggactgtcaccatcctctgcattgacttgggcactgacatggttcctgccatctccctggcttatgagcaggctgagagtgacatcatgaagagacagcccagaaatcccaaaacagacaaacttgtgaatgagcggctgatcagcatggcctatgggcagattggaatgatccaggccctgggaggcttctttacttactttgtgattctggctgagaacggcttcctcccaattcacctgttgggcctccgagtggactgggatgaccgctggatcaacgatgtggaagacagctacgggcagcagtggacctatgagcagaggaaaatcgtggagttcacctgccacacagccttcttcgtcagtatcgtggtggtgcagtgggccgacttggtcatctgtaagaccaggaggaattcggtcttccagcaggggatgaagaacaagatcttgatatttggcctctttgaagagacagccctggctgctttcctttcctactgccctggaatgggtgttgctcttaggatgtatcccctcaaacctacctggtggttctgtgccttcccctactctcttctcatcttcgtatatgacgaagtcagaaaactcatcatcaggcgacgccctggcggctgggtggagaaggaaacctactattagccccccgtcctgcacgccgtggagcatcaggccacacactctgcatccgacacccaccccctctttgtgtacttcagtcttggagtttggaactctaccctggtaggaaagcaccgcagcatgtggggaagcaagacgtcctggaatgaagcatgtagctctatggggggaggggggagggctgcctgaaaaccatccatctgtggaaatgacagcggggaaggtttttatgtgcctttttgtttttgtaaaaaaggaacacccggaaagactgaaagaatacattttatatctggatttttacaaataaagatggctattataatggaatttgtctgtgccctcgtcgcttctttggtacagatgtctatgtgatctggagctgtggttttcaacatgagtccctgaccagcagtttatcagcatcacctggttgcttgctaggaaggcgggcccagacccactgagtcagaaatgcatcagcaatgtggcttaataagccctcaggtgattttgatttacattcaagtttggaaaccactggctaagaggaagcattctgcccgtgctcttttagttggagtaggtgagtttacctgacccattttttctggctgctgcctggggtgatagggctgtaactccacctgctgccttagcatctggctttttgatggaagagcacctcgcctaaaggatttccagaccctcagagtatactaaactgcagatgaggcccttctctttcagtctaaaagagacctgaagccttcctgctttccctccagagatcaccaccacatctcaagtgtctctagcccagggcttatctgagaagcagaaatctatcccacacagtctgcctgggcatgtgtgctgagaagtggttcccttccttccatataatgtgttcctaatttagcatcaatgacacaatt

SEQ ID NO: 572 - DNA, 5245 bp, Homo sapiens
gcgcgcgggaggagggagccgggaggagggggcggggccgcgccgcccgcgccgcgctgggcgctctcggccaatgagcggcgtccacatgccgcggcggcggcgaaaggggaggcagcggccgataaatgctattagagcagccgccgcggagccgtccccgacgccacctccttttccttcgccgcagtttcctccgccgctgtcgggcgtgcggcgctgagggacccgggcgagcgcgccgcgcaccgccccgccggctcgcctccctcgccgcgttccgccctcagtggtctgccgggcgccccctcctccggcccgggcggggcctctgatcgcctcaagagagcggggagggggctcgggggccgcggcctgccctcccggcgggcggctgagggcgagggaggccctcccttctggcgaggggagggagggtgggtcaggagcccccaacccgccctgcggagctcggggccgcgcgaggggcggttgtctgggggagggggcgcggggtgattcagcgcccggcgaggcggaagcggccgcaagaggaggaggggagagcccgtccgcgcctgggctcccggggtggcacgagcccgcggccggagtgcgaggcggaggcgaggaggccgcggggacgggaggcgaggccggccgggcccccgaagccatggagaacgcgcacaccaagacggtggaggaggtgctgggccacttcggcgtcaacgagagtacggggctgagcctggaacaggtcaagaagcttaaggagagatggggctccaacggtaggtgcagggcgaaaaaccttgctggaacttgtgattgagcagtttgaagacttgctagttaggattttattactggcagcatgtatatcttttgttttggcttggtttgaagaaggtgaagaaacaattacagcctttgtagaaccttttgtaattttactcatattagtagccaatgcaattgtgggtgtatggcaggaaagaaatgctgaaaatgccatcgaagcccttaaggaatatgagcctgaaatgggcaaagtgtatcgacaggacagaaagagtgtgcagcggattaaagctaaagacatagttcctggtgatattgtagaaattgctgttggtgacaaagttcctgctgatataaggttaacttccatcaaatctaccacactaagagttgaccagtcaattctcacaggtgaatctgtctctgtcatcaagcacactgatcccgtccctgacccacgagctgtcaaccaagataaaaagaacatgctgttttctggtacaaacattgctgctgggaaagctatgggagtggtggtagcaactggagttaacaccgaaattggcaagatccgggatgaaatggtggcaacagaacaggagagaacaccccttcagcaaaaactagatgaatttggggaacagctttccaaagtcatctcccttatttgcattgcagtctggatcataaatattgggcacttcaatgacccggttcatggagggtcctggatcagaggtgctatttactactttaaaattgcagtggccctggctgtagcagccattcctgaaggtctgcctgcagtcatcaccacctgcctggctcttggaactcgcagaatggcaaagaaaaatgccattgttcgaagcctcccgtctgtggaaacccttggttgtacttctgttatctgctcagacaagactggtacacttacaacaaaccagatgtcagtctgcaggatgttcattctggacagagtggaaggtgatacttgttcccttaatgagtttaccataactggatcaacttatgcacctattggagaagtgcataaagatgataaaccagtgaattgtcaccagtatgatggtctggtagaattagcaacaatttgtgctctttgtaatgactctgctttggattacaatgaggcaaagggtgtgtatgaaaaagttggagaagctacagagactgctctcacttgcctagtagagaagatgaatgtatttgataccgaattgaagggtctttctaaaatagaacgtgcaaatgcctgcaactcagtcattaaacagctgatgaaaaaggaattcactctagagttttcacgtgacagaaagtcaatgtcggtttactgtacaccaaataaaccaagcaggacatcaatgagcaagatgtttgtgaagggtgctcctgaaggtgtcattgacaggtgcacccacattcgagttggaagtactaaggttcctatgacctctggagtcaaacagaagatcatgtctgtcattcgagagtggggtagtggcagcgacacactgcgatgcctggccctggccactcatgacaacccactgagaagagaagaaatgcaccttgaggactctgccaactttattaaatatgagaccaatctgaccttcgttggctgcgtgggcatgctggatcctccgagaatcgaggtggcctcctccgtgaagctgtgccggcaagcaggcatccgggtcatcatgatcactggggacaacaagggcactgctgtggccatctgtcgccgcatcggcatcttcgggcaggatgaggacgtgacgtcaaaagctttcacaggccgggagtttgatgaactcaacccctccgcccagcgagacgcctgcctgaacgcccgctgttttgctcgagttgaaccctcccacaagtctaaaatcgtagaatttcttcagtcttttgatgagattacagctatgactggcgatggcgtgaacgatgctcctgctctgaagaaagccgagattggcattgctatgggctctggcactgcggtggctaaaaccgcctctgagatggtcctggcggatgacaacttctccaccattgtggctgccgttgaggaggggcgggcaatctacaacaacatgaaacagttcatccgctacctcatctcgtccaacgtcggggaagttgtctgtattttcctgacagcagcccttggatttcccgaggctttgattcctgttcagctgctctgggtcaatctggtgacagatggcctgcctgccactgcactggggttcaaccctcctgatctggacatcatgaataaacctccccggaacccaaaggaaccattgatcagcgggtggctctttttccgttacttggctattggctgttacgtcggcgctgctaccgtgggtgctgctgcatggtggttcattgctgctgacggtggtccaagagtgtccttctaccagctgagtcatttcctacagtgtaaagaggacaacccggactttgaaggcgtggattgtgcaatctttgaatccccatacccgatgacaatggcgctctctgttctagtaactatagaaatgtgtaacgccctcaacagcttgtccgaaaaccagtccttgctgaggatgcccccctgggagaacatctggctcgtgggctccatctgcctgtccatgtcactccacttcctgatcctctatgtcgaacccttgccactcatcttccagatcacaccgctgaacgtgacccagtggctgatggtgctgaaaatctccttgcccgtgattctcatggatgagacgctcaagtttgtggcccgcaactacctggaacctggtaaagagtgtgtgcagcctgccaccaaatcctgctcgttctcggcatgcaccgatgggatttcctggccgtttgtgctgctcataatgcccctggtgatctgggtctatagcacagacactaactttagcgatatgttctggtcttgactgacagttttccataaagaagatgtttaacttaatcaattaatttttttattgtttaaagcaactgtctatttctgctgaattttcacatgaacatactggctggtgatggaggtttcatactctagattttgttttgctttttctgactccagtggggcaagattttccttttttatacacataattaaagtgtccattgacatgtacagagaactaacactattttatgcaaatatttttttgtagatgaaaaagcatgtacagtgttctgtttaatactcatccttgtataaaaaaaatagttgagccagcagacattgtcagcaaattaattggcagcagattttaggaaatgaatgtgtgtggttttttttctaaaactaaatagcatgtattgtgtcttttgcatgatgatccggatttaatttgatatcacagtctaatttttattcataagccaatttttctgcactgagcagagtcttgctacctcagtcagtattgttttggtttgctacttccctcacccactttggcctccgttcaccccaccccaccccacctctccccaccttacccccgccccgcttggcttcttctttaggattgtgatggttcgttctgtttacatcagttttaacgagaggtatgcctgtactcgcttgtgcagaaaacattgttccagattcaatcgactgggtttatgtcccttcacatagtttttaaggttatttatttaaatgtctaatgtattttattgtaacagacattgttttgccaacattgcctatttcagtggcacgtcatctagttttaaaaaaataaaacattttaaatggacagagaaaaataactgtcttgtctttaactcgtaagtggcttacctgggactaacagacatgtccaactttctctccagttcttagctcagaactttagttgtactctgcttgaggggaagaaggctcctgctctgctgtgtaggtagtcataggaattgtattcttaatgtacaggcactaattgtcatctgtgatgtacattttatgcaagtttctgctggcctggtatagagaacataagggcaagtgtgtatgtgtgtgtatgtgtgtgttttgtaaaatctgtaaatagcacatgaccaaatgaacatattgtatagaactatttttatttgaatgtggcactaaccaccaccaccgttactacgatcaatgtttgcgcatgttcgagatgagtctcaccaacagtgtgtaagtcattaacagtcctaactgtggtgttttcctccaatgccttccaacatccatcaactaacgtgagtattttcttcctgggatttggatgctttagcctaaaggtgactgccaccaagtgagataactgtatgtcactaacttataagccgcctccatggcagatgctgctgtgctccctgatgc

SEQ ID NO: 573 - DNA, 5929 bp, Homo sapiens
gcgcgcgggaggagggagccgggaggagggggcggggccgcgccgcccgcgccgcgctgggcgctctcggccaatgagcggcgtccacatgccgcggcggcggcgaaaggggaggcagcggccgataaatgctattagagcagccgccgcggagccgtccccgacgccacctccttttccttcgccgcagtttcctccgccgctgtcgggcgtgcggcgctgagggacccgggcgagcgcgccgcgcaccgccccgccggctcgcctccctcgccgcgttccgccctcagtggtctgccgggcgccccctcctccggcccgggcggggcctctgatcgcctcaagagagcggggagggggctcgggggccgcggcctgccctcccggcgggcggctgagggcgagggaggccctcccttctggcgaggggagggagggtgggtcaggagcccccaacccgccctgcggagctcggggccgcgcgaggggcggttgtctgggggagggggcgcggggtgattcagcgcccggcgaggcggaagcggccgcaagaggaggaggggagagcccgtccgcgcctgggctcccggggtggcacgagcccgcggccggagtgcgaggcggaggcgaggaggccgcggggacgggaggcgaggccggccgggcccccgaagccatggagaacgcgcacaccaagacggtggaggaggtgctgggccacttcggcgtcaacgagagtacggggctgagcctggaacaggtcaagaagcttaaggagagatggggctccaacgagttaccggctgaagaaggaaaaaccttgctggaacttgtgattgagcagtttgaagacttgctagttaggattttattactggcagcatgtatatcttttgttttggcttggtttgaagaaggtgaagaaacaattacagcctttgtagaaccttttgtaattttactcatattagtagccaatgcaattgtgggtgtatggcaggaaagaaatgctgaaaatgccatcgaagcccttaaggaatatgagcctgaaatgggcaaagtgtatcgacaggacagaaagagtgtgcagcggattaaagctaaagacatagttcctggtgatattgtagaaattgctgttggtgacaaagttcctgctgatataaggttaacttccatcaaatctaccacactaagagttgaccagtcaattctcacaggtgaatctgtctctgtcatcaagcacactgatcccgtccctgacccacgagctgtcaaccaagataaaaagaacatgctgttttctggtacaaacattgctgctgggaaagctatgggagtggtggtagcaactggagttaacaccgaaattggcaagatccgggatgaaatggtggcaacagaacaggagagaacaccccttcagcaaaaactagatgaatttggggaacagctttccaaagtcatctcccttatttgcattgcagtctggatcataaatattgggcacttcaatgacccggttcatggagggtcctggatcagaggtgctatttactactttaaaattgcagtggccctggctgtagcagccattcctgaaggtctgcctgcagtcatcaccacctgcctggctcttggaactcgcagaatggcaaagaaaaatgccattgttcgaagcctcccgtctgtggaaacccttggttgtacttctgttatctgctcagacaagactggtacacttacaacaaaccagatgtcagtctgcaggatgttcattctggacagagtggaaggtgatacttgttcccttaatgagtttaccataactggatcaacttatgcacctattggagaagtgcataaagatgataaaccagtgaattgtcaccagtatgatggtctggtagaattagcaacaatttgtgctctttgtaatgactctgctttggattacaatgaggcaaagggtgtgtatgaaaaagttggagaagctacagagactgctctcacttgcctagtagagaagatgaatgtatttgataccgaattgaagggtctttctaaaatagaacgtgcaaatgcctgcaactcagtcattaaacagctgatgaaaaaggaattcactctagagttttcacgtgacagaaagtcaatgtcggtttactgtacaccaaataaaccaagcaggacatcaatgagcaagatgtttgtgaaggcaaggtgctcctgaaggtgtcattgacaggtgcacccacattcgagttggaagtactaaggttcctatgacctctggagtcaaacagaagatcatgtctgtcattcgagagtggggtagtggcagcgacacactgcgatgcctggccctggccactcatgacaacccactgagaagagaagaaatgcaccttgaggactctgccaactttattaaatatgagaccaatctgaccttcgttggctgcgtgggcatgctggatcctccgagaatcgaggtggcctcctccgtgaagctgtgccggcaagcaggcatccgggtcatcatgatcactggggacaacaagggcactgctgtggccatctgtcgccgcatcggcatcttcgggcaggatgaggacgtgacgtcaaaagctttcacaggccgggagtttgatgaactcaacccctccgcccagcgagacgcctgcctgaacgcccgctgttttgctcgagttgaaccctcccacaagtctaaaatcgtagaatttcttcagtcttttgatgagattacagctatgactggcgatggcgtgaacgatgctcctgctctgaagaaagccgagattggcattgctatgggctctggcactgcggtggctaaaaccgcctctgagatggtcctggcggatgacaacttctccaccattgtggctgccgttgaggaggggcgggcaatctacaacaacatgaaacagttcatccgctacctcatctcgtccaacgtcggggaagttgtctgtattttcctgacagcagcccttggatttcccgaggctttgattcctgttcagctgctctgggtcaatctggtgacagatggcctgcctgccactgcactggggttcaaccctcctgatctggacatcatgaataaacctccccggaacccaaaggaaccattgatcagcgggtggctctttttccgttacttggctattggctgttacgtcggcgctgctaccgtgggtgctgctgcatggtggttcattgctgctgacggtggtccaagagtgtccttctaccagctgagtcatttcctacagtgtaaagaggacaacccggactttgaaggcgtggattgtgcaatctttgaatccccatacccgatgacaatggcgctctctgttctagtaactatagaaatgtgtaacgccctcaacagcttgtccgaaaaccagtccttgctgaggatgcccccctgggagaacatctggctcgtgggctccatctgcctgtccatgtcactccacttcctgatcctctatgtcgaacccttgccactcatcttccagatcacaccgctgaacgtgacccagtggctgatggtgctgaaaatctccttgcccgtgattctcatggatgagacgctcaagtttgtggcccgcaactacctggaacctggtaaagagtgtgtgcagcctgccaccaaatcctgctcgttctcggcatgcaccgatgggatttcctggccgtttgtgctgctcataatgcccctggtgatctgggtctatagcacagacactaactttagcgatatgttctggtcttgactgacagttttccataaagaagatgtttaacttaatcaattaatttttttattgtttaaagcaactgtctatttctgctgaattttcacatgaacatactggctggtgatggaggtttcatactctagattttgttttgctttttctgactccagtggggcaagattttccttttttatacacataattaaagtgtccattgacatgtacagagaactaacactattttatgcaaatatttttttgtagatgaaaaagcatgtacagtgttctgtttaatactcatccttgtataaaaaaaatagttgagccagcagacattgtcagcaaattaattggcagcagattttaggaaatgaatgtgtgtggttttttttctaaaactaaatagcatgtattgtgtcttttgcatgatgatccggatttaatttgatatcacagtctaatttttattcataagccaatttttctgcactgagcagagtcttgctacctcagtcagtattgttttggtttgctacttccctcacccactttggcctccgttcaccccaccccaccccacctctccccaccttacccccgccccgcttggcttcttctttaggattgtgatggttcgttctgtttacatcagttttaacgagaggtatgcctgtactcgcttgtgcagaaaacattgttccagattcaatcgactgggtttatgtcccttcacatagtttttaaggttatttatttaaatgtctaatgtattttattgtaacagacattgttttgccaacattgcctatttcagtggcacgtcatctagttttaaaaaaataaaacattttaaatggacagagaaaaataactgtcttgtctttaactcgtaagtggcttacctgggactaacagacatgtccaactttctctccagttcttagctcagaactttagttgtactctgcttgaggggaagaaggctcctgctctgctgtgtaggtagtcataggaattgtattcttaatgtacaggcactaattgtcatctgtgatgtacattttatgcaagtttctgctggcctggtatagagaacataagggcaagtgtgtatgtgtgtgtatgtgtgtgttttgtaaaatctgtaaatagcacatgaccaaatgaacatattgtatagaactatttttatttgaatgtggcactaaccaccaccaccgttactacgatcaatgtttgcgcatgttcgagatgagtctcaccaacagtgtgtaagtcattaacagtcctaactgtggtgttttcctccaatgccttccaacatccatcaactaaccaatactggagtaaccgcttcctaaaccattttgcagaaatgtaagggtgttcggttgcgtgcatgtgcgtttttagcaacacatctaccaaccctgtgcatgactgatgttggggaaaaagaaaagtaaaaaacttcccaactcactttgtgttatgtggaggaaatgtgtattaccaatggggttgttagcttttaaatcaaaatactgattacagatgtacaatttagcttaatcagaaagcctctccagagaagtttggtttctttgctgcaagaggaatgaggctctgtaaccttatctaagaacttggaagccgtcagccaagtcgccacatttctctgcaaaatgtcatagcttatataaatgtacagtattcaattgtaatgcatgccttcggttgtaagtagccagatccctctccagtgacattggaacatgctactttttaattggccctgtacagtttgcttatttataaattcattaaaaacactacaggtgttgaatggttaaaatgtaggcctccagttcattttcagttattttctgagtgtgcagacagctatttcgcactgtattaaatgtaacttatttaatgaaatcagaagcagtagacagatgttggtgcaatacaaatattgtgatgcatttatcttaataaaatgctaaatgtcaatttatcactgcgcatgtttgactttagactgtaaatagagatcagtttgtttctttctgtgctggtaacaatgagcgtcgcacagacatggtttcaggtaaataaatctattctatgat

SEQ ID NO: 574 - DNA, 5924 bp, Homo sapiens
gcgcgcgggaggagggagccgggaggagggggcggggccgcgccgcccgcgccgcgctgggcgctctcggccaatgagcggcgtccacatgccgcggcggcggcgaaaggggaggcagcggccgataaatgctattagagcagccgccgcggagccgtccccgacgccacctccttttccttcgccgcagtttcctccgccgctgtcgggcgtgcggcgctgagggacccgggcgagcgcgccgcgcaccgccccgccggctcgcctccctcgccgcgttccgccctcagtggtctgccgggcgccccctcctccggcccgggcggggcctctgatcgcctcaagagagcggggagggggctcgggggccgcggcctgccctcccggcgggcggctgagggcgagggaggccctcccttctggcgaggggagggagggtgggtcaggagcccccaacccgccctgcggagctcggggccgcgcgaggggcggttgtctgggggagggggcgcggggtgattcagcgcccggcgaggcggaagcggccgcaagaggaggaggggagagcccgtccgcgcctgggctcccggggtggcacgagcccgcggccggagtgcgaggcggaggcgaggaggccgcggggacgggaggcgaggccggccgggcccccgaagccatggagaacgcgcacaccaagacggtggaggaggtgctgggccacttcggcgtcaacgagagtacggggctgagcctggaacaggtcaagaagcttaaggagagatggggctccaacggtaggtgcagggcgaaaaaccttgctggaacttgtgattgagcagtttgaagacttgctagttaggattttattactggcagcatgtatatcttttgttttggcttggtttgaagaaggtgaagaaacaattacagcctttgtagaaccttttgtaattttactcatattagtagccaatgcaattgtgggtgtatggcaggaaagaaatgctgaaaatgccatcgaagcccttaaggaatatgagcctgaaatgggcaaagtgtatcgacaggacagaaagagtgtgcagcggattaaagctaaagacatagttcctggtgatattgtagaaattgctgttggtgacaaagttcctgctgatataaggttaacttccatcaaatctaccacactaagagttgaccagtcaattctcacaggtgaatctgtctctgtcatcaagcacactgatcccgtccctgacccacgagctgtcaaccaagataaaaagaacatgctgttttctggtacaaacattgctgctgggaaagctatgggagtggtggtagcaactggagttaacaccgaaattggcaagatccgggatgaaatggtggcaacagaacaggagagaacaccccttcagcaaaaactagatgaatttggggaacagctttccaaagtcatctcccttatttgcattgcagtctggatcataaatattgggcacttcaatgacccggttcatggagggtcctggatcagaggtgctatttactactttaaaattgcagtggccctggctgtagcagccattcctgaaggtctgcctgcagtcatcaccacctgcctggctcttggaactcgcagaatggcaaagaaaaatgccattgttcgaagcctcccgtctgtggaaacccttggttgtacttctgttatctgctcagacaagactggtacacttacaacaaaccagatgtcagtctgcaggatgttcattctggacagagtggaaggtgatacttgttcccttaatgagtttaccataactggatcaacttatgcacctattggagaagtgcataaagatgataaaccagtgaattgtcaccagtatgatggtctggtagaattagcaacaatttgtgctctttgtaatgactctgctttggattacaatgaggcaaagggtgtgtatgaaaaagttggagaagctacagagactgctctcacttgcctagtagagaagatgaatgtatttgataccgaattgaagggtctttctaaaatagaacgtgcaaatgcctgcaactcagtcattaaacagctgatgaaaaaggaattcactctagagttttcacgtgacagaaagtcaatgtcggtttactgtacaccaaataaaccaagcaggacatcaatgagcaagatgtttgtgaaggcaaggtgctcctgaaggtgtcattgacaggtgcacccacattcgagttggaagtactaaggttcctatgacctctggagtcaaacagaagatcatgtctgtcattcgagagtggggtagtggcagcgacacactgcgatgcctggccctggccactcatgacaacccactgagaagagaagaaatgcaccttgaggactctgccaactttattaaatatgagaccaatctgaccttcgttggctgcgtgggcatgctggatcctccgagaatcgaggtggcctcctccgtgaagctgtgccggcaagcaggcatccgggtcatcatgatcactggggacaacaagggcactgctgtggccatctgtcgccgcatcggcatcttcgggcaggatgaggacgtgacgtcaaaagctttcacaggccgggagtttgatgaactcaacccctccgcccagcgagacgcctgcctgaacgcccgctgttttgctcgagttgaaccctcccacaagtctaaaatcgtagaatttcttcagtcttttgatgagattacagctatgactggcgatggcgtgaacgatgctcctgctctgaagaaagccgagattggcattgctatgggctctggcactgcggtggctaaaaccgcctctgagatggtcctggcggatgacaacttctccaccattgtggctgccgttgaggaggggcgggcaatctacaacaacatgaaacagttcatccgctacctcatctcgtccaacgtcggggaagttgtctgtattttcctgacagcagcccttggatttcccgaggctttgattcctgttcagctgctctgggtcaatctggtgacagatggcctgcctgccactgcactggggttcaaccctcctgatctggacatcatgaataaacctccccggaacccaaaggaaccattgatcagcgggtggctctttttccgttacttggctattggctgttacgtcggcgctgctaccgtgggtgctgctgcatggtggttcattgctgctgacggtggtccaagagtgtccttctaccagctgagtcatttcctacagtgtaaagaggacaacccggactttgaaggcgtggattgtgcaatctttgaatccccatacccgatgacaatggcgctctctgttctagtaactatagaaatgtgtaacgccctcaacagcttgtccgaaaaccagtccttgctgaggatgcccccctgggagaacatctggctcgtgggctccatctgcctgtccatgtcactccacttcctgatcctctatgtcgaacccttgccactcatcttccagatcacaccgctgaacgtgacccagtggctgatggtgctgaaaatctccttgcccgtgattctcatggatgagacgctcaagtttgtggcccgcaactacctggaacctggtaaagagtgtgtgcagcctgccaccaaatcctgctcgttctcggcatgcaccgatgggatttcctggccgtttgtgctgctcataatgcccctggtgatctgggtctatagcacagacactaactttagcgatatgttctggtcttgactgacagttttccataaagaagatgtttaacttaatcaattaatttttttattgtttaaagcaactgtctatttctgctgaattttcacatgaacatactggctggtgatggaggtttcatactctagattttgttttgctttttctgactccagtggggcaagattttccttttttatacacataattaaagtgtccattgacatgtacagagaactaacactattttatgcaaatatttttttgtagatgaaaaagcatgtacagtgttctgtttaatactcatccttgtataaaaaaaatagttgagccagcagacattgtcagcaaattaattggcagcagattttaggaaatgaatgtgtgtggttttttttctaaaactaaatagcatgtattgtgtcttttgcatgatgatccggatttaatttgatatcacagtctaatttttattcataagccaatttttctgcactgagcagagtcttgctacctcagtcagtattgttttggtttgctacttccctcacccactttggcctccgttcaccccaccccaccccacctctccccaccttacccccgccccgcttggcttcttctttaggattgtgatggttcgttctgtttacatcagttttaacgagaggtatgcctgtactcgcttgtgcagaaaacattgttccagattcaatcgactgggtttatgtcccttcacatagtttttaaggttatttatttaaatgtctaatgtattttattgtaacagacattgttttgccaacattgcctatttcagtggcacgtcatctagttttaaaaaaataaaacattttaaatggacagagaaaaataactgtcttgtctttaactcgtaagtggcttacctgggactaacagacatgtccaactttctctccagttcttagctcagaactttagttgtactctgcttgaggggaagaaggctcctgctctgctgtgtaggtagtcataggaattgtattcttaatgtacaggcactaattgtcatctgtgatgtacattttatgcaagtttctgctggcctggtatagagaacataagggcaagtgtgtatgtgtgtgtatgtgtgtgttttgtaaaatctgtaaatagcacatgaccaaatgaacatattgtatagaactatttttatttgaatgtggcactaaccaccaccaccgttactacgatcaatgtttgcgcatgttcgagatgagtctcaccaacagtgtgtaagtcattaacagtcctaactgtggtgttttcctccaatgccttccaacatccatcaactaaccaatactggagtaaccgcttcctaaaccattttgcagaaatgtaagggtgttcggttgcgtgcatgtgcgtttttagcaacacatctaccaaccctgtgcatgactgatgttggggaaaaagaaaagtaaaaaacttcccaactcactttgtgttatgtggaggaaatgtgtattaccaatggggttgttagcttttaaatcaaaatactgattacagatgtacaatttagcttaatcagaaagcctctccagagaagtttggtttctttgctgcaagaggaatgaggctctgtaaccttatctaagaacttggaagccgtcagccaagtcgccacatttctctgcaaaatgtcatagcttatataaatgtacagtattcaattgtaatgcatgccttcggttgtaagtagccagatccctctccagtgacattggaacatgctactttttaattggccctgtacagtttgcttatttataaattcattaaaaacactacaggtgttgaatggttaaaatgtaggcctccagttcattttcagttattttctgagtgtgcagacagctatttcgcactgtattaaatgtaacttatttaatgaaatcagaagcagtagacagatgttggtgcaatacaaatattgtgatgcatttatcttaataaaatgctaaatgtcaatttatcactgcgcatgtttgactttagactgtaaatagagatcagtttgtttctttctgtgctggtaacaatgagcgtcgcacagacatggtttcaggtaaataaatctattctatgat

SEQ ID NO: 575 - DNA, 4450 bp, Homo sapiens
gcgcgcgggaggagggagccgggaggagggggcggggccgcgccgcccgcgccgcgctgggcgctctcggccaatgagcggcgtccacatgccgcggcggcggcgaaaggggaggcagcggccgataaatgctattagagcagccgccgcggagccgtccccgacgccacctccttttccttcgccgcagtttcctccgccgctgtcgggcgtgcggcgctgagggacccgggcgagcgcgccgcgcaccgccccgccggctcgcctccctcgccgcgttccgccctcagtggtctgccgggcgccccctcctccggcccgggcggggcctctgatcgcctcaagagagcggggagggggctcgggggccgcggcctgccctcccggcgggcggctgagggcgagggaggccctcccttctggcgaggggagggagggtgggtcaggagcccccaacccgccctgcggagctcggggccgcgcgaggggcggttgtctgggggagggggcgcggggtgattcagcgcccggcgaggcggaagcggccgcaagaggaggaggggagagcccgtccgcgcctgggctcccggggtggcacgagcccgcggccggagtgcgaggcggaggcgaggaggccgcggggacgggaggcgaggccggccgggcccccgaagccatggagaacgcgcacaccaagacggtggaggaggtgctgggccacttcggcgtcaacgagagtacggggctgagcctggaacaggtcaagaagcttaaggagagatggggctccaacggtaggtgcagggcgaaaaaccttgctggaacttgtgattgagcagtttgaagacttgctagttaggattttattactggcagcatgtatatcttttgttttggcttggtttgaagaaggtgaagaaacaattacagcctttgtagaaccttttgtaattttactcatattagtagccaatgcaattgtgggtgtatggcaggaaagaaatgctgaaaatgccatcgaagcccttaaggaatatgagcctgaaatgggcaaagtgtatcgacaggacagaaagagtgtgcagcggattaaagctaaagacatagttcctggtgatattgtagaaattgctgttggtgacaaagttcctgctgatataaggttaacttccatcaaatctaccacactaagagttgaccagtcaattctcacaggtgaatctgtctctgtcatcaagcacactgatcccgtccctgacccacgagctgtcaaccaagataaaaagaacatgctgttttctggtacaaacattgctgctgggaaagctatgggagtggtggtagcaactggagttaacaccgaaattggcaagatccgggatgaaatggtggcaacagaacaggagagaacaccccttcagcaaaaactagatgaatttggggaacagctttccaaagtcatctcccttatttgcattgcagtctggatcataaatattgggcacttcaatgacccggttcatggagggtcctggatcagaggtgctatttactactttaaaattgcagtggccctggctgtagcagccattcctgaaggtctgcctgcagtcatcaccacctgcctggctcttggaactcgcagaatggcaaagaaaaatgccattgttcgaagcctcccgtctgtggaaacccttggttgtacttctgttatctgctcagacaagactggtacacttacaacaaaccagatgtcagtctgcaggatgttcattctggacagagtggaaggtgatacttgttcccttaatgagtttaccataactggatcaacttatgcacctattggagaagtgcataaagatgataaaccagtgaattgtcaccagtatgatggtctggtagaattagcaacaatttgtgctctttgtaatgactctgctttggattacaatgaggcaaagggtgtgtatgaaaaagttggagaagctacagagactgctctcacttgcctagtagagaagatgaatgtatttgataccgaattgaagggtctttctaaaatagaacgtgcaaatgcctgcaactcagtcattaaacagctgatgaaaaaggaattcactctagagttttcacgtgacagaaagtcaatgtcggtttactgtacaccaaataaaccaagcaggacatcaatgagcaagatgtttgtgaagggtgctcctgaaggtgtcattgacaggtgcacccacattcgagttggaagtactaaggttcctatgacctctggagtcaaacagaagatcatgtctgtcattcgagagtggggtagtggcagcgacacactgcgatgcctggccctggccactcatgacaacccactgagaagagaagaaatgcaccttgaggactctgccaactttattaaatatgagaccaatctgaccttcgttggctgcgtgggcatgctggatcctccgagaatcgaggtggcctcctccgtgaagctgtgccggcaagcaggcatccgggtcatcatgatcactggggacaacaagggcactgctgtggccatctgtcgccgcatcggcatcttcgggcaggatgaggacgtgacgtcaaaagctttcacaggccgggagtttgatgaactcaacccctccgcccagcgagacgcctgcctgaacgcccgctgttttgctcgagttgaaccctcccacaagtctaaaatcgtagaatttcttcagtcttttgatgagattacagctatgactggcgatggcgtgaacgatgctcctgctctgaagaaagccgagattggcattgctatgggctctggcactgcggtggctaaaaccgcctctgagatggtcctggcggatgacaacttctccaccattgtggctgccgttgaggaggggcgggcaatctacaacaacatgaaacagttcatccgctacctcatctcgtccaacgtcggggaagttgtctgtattttcctgacagcagcccttggatttcccgaggctttgattcctgttcagctgctctgggtcaatctggtgacagatggcctgcctgccactgcactggggttcaaccctcctgatctggacatcatgaataaacctccccggaacccaaaggaaccattgatcagcgggtggctctttttccgttacttggctattggctgttacgtcggcgctgctaccgtgggtgctgctgcatggtggttcattgctgctgacggtggtccaagagtgtccttctaccagctgagtcatttcctacagtgtaaagaggacaacccggactttgaaggcgtggattgtgcaatctttgaatccccatacccgatgacaatggcgctctctgttctagtaactatagaaatgtgtaacgccctcaacagcttgtccgaaaaccagtccttgctgaggatgcccccctgggagaacatctggctcgtgggctccatctgcctgtccatgtcactccacttcctgatcctctatgtcgaacccttgccactcatcttccagatcacaccgctgaacgtgacccagtggctgatggtgctgaaaatctccttgcccgtgattctcatggatgagacgctcaagtttgtggcccgcaactacctggaacctgcaatactggagtaaccgcttcctaaaccattttgcagaaatgtaagggtgttcggttgcgtgcatgtgcgtttttagcaacacatctaccaaccctgtgcatgactgatgttggggaaaaagaaaagtaaaaaacttcccaactcactttgtgttatgtggaggaaatgtgtattaccaatggggttgttagcttttaaatcaaaatactgattacagatgtacaatttagcttaatcagaaagcctctccagagaagtttggtttctttgctgcaagaggaatgaggctctgtaaccttatctaagaacttggaagccgtcagccaagtcgccacatttctctgcaaaatgtcatagcttatataaatgtacagtattcaattgtaatgcatgccttcggttgtaagtagccagatccctctccagtgacattggaacatgctactttttaattggccctgtacagtttgcttatttataaattcattaaaaacactacaggtgttgaatggttaaaatgtaggcctccagttcattttcagttattttctgagtgtgcagacagctatttcgcactgtattaaatgtaacttatttaatgaaatcagaagcagtagacagatgttggtgcaatacaaatattgtgatgcatttatcttaataaaatgctaaatgtcaatttatcactgcgcatgtttgactttagactgtaaatagagatcagtttgtttctttctgtgctggtaacaatgagcgtcgcacagacatggtttcaggtaaataaatctattctatgat

SEQ ID NO: 576 - DNA, 5477 bp, Homo sapiens
tctctgtctgccagggtctccgactgtcccagacgggctggtgtgggcttgggatcctcctggtgacctctcccgctaaggtccctcagccactctgccccaagatgggccgtggggctggccgtgagtactcacctgccgccaccacggcagagaatgggggcggcaagaagaaacagaaggagaaggaactggatgagctgaagaaggaggtggcaatggatgaccacaagctgtccttggatgagctgggccgcaaataccaagtggacctgtccaagggcctcaccaaccagcgggctcaggacgttctggctcgagatgggcccaacgccctcacaccacctcccacaacccctgagtgggtcaagttctgccgtcagcttttcggggggttctccatcctgctgtggattggggctatcctctgcttcctggcctacggcatccaggctgccatggaggatgaaccatccaacgacaatctatatctgggtgtggtgctggcagctgtggtcattgtcactggctgcttctcctactaccaggaggccaagagctccaagatcatggattccttcaagaacatggtacctcagcaagcccttgtgatccgggagggagagaagatgcagatcaacgcagaggaagtggtggtgggagacctggtggaggtgaagggtggagaccgcgtccctgctgacctccggatcatctcttctcatggctgtaaggtggataactcatccttaacaggagagtcggagccccagacccgctcccccgagttcacccatgagaaccccctggagacccgcaatatctgtttcttctccaccaactgtgttgaaggcactgccaggggcattgtgattgccacaggagaccggacggtgatgggccgcatagctactctcgcctcaggcctggaggttgggcggacacccatagcaatggagattgaacacttcatccagctgatcacaggggtcgctgtattcctgggggtctccttcttcgtgctctccctcatcctgggctacagctggctggaggcagtcatcttcctcatcggcatcatagtggccaacgtgcctgaggggcttctggccactgtcactgtgtgcctgaccctgacagccaagcgcatggcacggaagaactgcctggtgaagaacctggaggcggtggagacgctgggctccacgtccaccatctgctcggacaagacgggcaccctcacccagaaccgcatgaccgtcgcccacatgtggttcgacaaccaaatccatgaggctgacaccaccgaagatcagtctggggccacttttgacaaacgatcccctacgtggacggccctgtctcgaattgctggtctctgcaaccgcgccgtcttcaaggcaggacaggagaacatctccgtgtctaaggtaggggctggtgatgcctctgagtcagctctgctcaagtgcattgagctctcctgtggctcagtgaggaaaatgagagacagaaaccccaaggtggcagagattcctttcaactctaccaacaagtaccagctgtctatccacgagcgagaagacagcccccagagccacgtgctggtgatgaagggggccccagagcgcattctggaccggtgctccaccatcctggtgcagggcaaggagatcccgctcgacaaggagatgcaagatgcctttcaaaatgcctacatggagctggggggacttggggagcgtgtgctgggattctgtcaactgaatctgccatctggaaagtttcctcggggcttcaaattcgacacggatgagctgaactttcccacggagaagctttgctttgtggggctcatgtctatgattgaccctccccgggctgctgtgccagatgctgtgggcaagtgccgaagcgcaggcatcaaggtgatcatggtaaccggggatcaccctatcacagccaaggccattgccaaaggcgtgggcatcatatcagagggggtcagctgtctctgtccccacccaccctccagagaagccaaggcatgcgtggtgcacggctctgacctgaaggacatgacatcggagcagctcgatgagatcctcaagaaccacacagagatcgtctttgctcgaacgtctccccagcagaagctcatcattgtggagggatgtcagaggcagggagccattgtggccgtgacgggtgacggggtgaacgactcccctgcattgaagaaggctgacattggcattgccatgggcatctctggctctgacgtctctaagcaggcagccgacatgatcctgctggatgacaactttgcctccatcgtcacgggggtggaggagggccgcctgatctttgacaacttgaagaaatccatcgcctacaccctgaccagcaacatccccgagatcacccccttcctgctgttcatcattgccaacatccccctacctctgggcactgtgaccatcctttgcattgacctgggcacagatatggtccctgccatctccttggcctatgaggcagctgagagtgatatcatgaagcggcagccacgaaactcccagacggacaagctggtgaatgagaggctcatcagcatggcctacggacagatcgggatgatccaggcactgggtggcttcttcacctactttgtgatcctggcagagaacggtttcctgccatcacggctactgggaatccgcctcgactgggatgaccggaccatgaatgatctggaggacagctatggacaggagtggacctatgagcagcggaaggtggtggagttcacgtgccacacggcattctttgccagcatcgtggtggtgcagtgggctgacctcatcatctgcaagacccgccgcaactcagtcttccagcagggcatgaagaacaagatcctgatttttgggctcctggaggagacggcgttggctgcctttctctcttactgcccaggcatgggtgtagccctccgcatgtacccgctcaaagtcacctggtggttctgcgccttcccctacagcctcctcatcttcatctatgatgaggtccgaaagctcatcctgcggcggtatcctggtggctgggtggagaaggagacatactactgaccccattggaagaagaaccaggcatggaaagatggggagctctggaggtgttgtggggatggtgatggagagggatggaaataacgggtggcattgggtggcaacatttggggagagataatgaggcaactcagcaggctaagttgcggggtatataaattggggtgatgaccccatagacctaactgtgaacaatcagattagacactatgtgttagagtccccccgaccagatccttttccatcccactccactatgttgtctattttttctgaggaattaagggttaccccaccctgcccactcccatcccttcaaccccacttcctactgtaatagatcagcatccaaaagcaggaacccatctaaaccagaaggaagccctctcagatcaccccagcctcactccatttcccacttccacccccgttagcttcctgcaggactctatccctggcttccccttcagaccttgcaatcacaaaaggttcttctggtgagtgcaagagcctgagactggaaaaggtggacttgtctcccagtcgaggctggtaagggaccttcagggagagctgggcagacaggtgggagatggaggtagggctggctggaggaaggaaacaacaaaggaagtgaggtagtgccaatgacaggacatttgacatgagtctccagatagatgtcgtggactccagctctacgtcccacattttagaataccccaccagcagaacaaactcagatctcatcagggtagcagcagaggcaggaccagaaggcaatcaagagcttccagaaatgccacacttgtgtgccacagagttccccgctgacccttggttaggggtcctcttagtccacaaggtccggatgtcactcatgtacttaataacacttcaccttctgtaatactaagtcctcagagctccatgctgttctgaaagggatggccacaagttctttcccagcctcttccattccctttcttttcatgcccatcccgatgaacctgcatcattccccgacactgccaagccaaccctggaaaaggagttcgctggccattggctagaatcagggtggagaagttccctgaaccttcctgtctcccagggacatgtatgcttccagggacaagcttaggtcatgaacatggtcagaacctttggacaagaggaaaaatactaagagatttgctttttctgggtgcggtggctcatgcctgtaatcccagcactttgggaggccgaggcaggtggatcatgaggtcaggagttcgaggcgagcctggccaacatggtgaaaccctgtctctactaaaagtacaaaaaattagccagtcatggtggcacacgcctgtaatctcagctactcaggaggctgaggcaggagaattgcttgaacctgtgaggaagaggttgcagtgagctgagatcgtgccattacactccagcctgggcgaaagggtgagactccatctcaaaaaaaaaaaaaatgatttgcttttgacgtcttaggtggcagggctgttccctccaggcaaatgcccttcaaaccgacgatcattgtgcccacttaccctgggctggagagttggtttcaggttcctacaggagatagctttctttcccttactccctatctaacacttttgctctgcaggcagccttgcccattctctaagcctggcttagaaggcactgggaatgtcctgtagagagagacctagataggtcatgcaagtgagaaagacatctgaggaaaatggaagacctaaggcagacaggaaggaagcacaaaagacaagcattgggtcagacccataaaccacctcccaaaggctgtcatttcattgcactggaattttgctttatcagaagcaaggaagtaagggagtcattgccttgggcctgggaatctaagtgggagacaatattaatttggatccgattaattggagattactaactgtggacaaaagtttatctttgcacaatcaataaaaatggcatttttttagtaaattaagagcataaacaatattgctagaggtggcatgtttagtctaccaaaaacaatacttttcaggcactttagaaatatccttttagaagcagcgagtgcatgggctaattatcatcaatctttatgtatttgttaaagaaacatctacaggatctttattggtgaccttttgtaagacattagtttgaggtactacctatgtacttgaaaataataaagtggcatttctttatgaaaaaaaaagaaatctcttccataattcagatttctacactttatacttgcctccctcctaaatcgtgatattgaaatatgtg

SEQ ID NO: 577 - DNA, 4716 bp, Homo sapiens
tctctgtctgccagggtctccgactgtcccagacgggctggtgtgggcttgggatcctcctggtgacctctcccgctaaggtccctcagccactctgccccaagatgggccgtggggctggccgtgagtactcacctgccgccaccacggcagagaatgggggcggcaagaagaaacagaaggagaaggaactggatgagctgaagaaggaggtggcaatggatgaccacaagctgtccttggatgagctgggccgcaaataccaagtggacctgtccaagggcctcaccaaccagcgggctcaggacgttctggctcgagatgggcccaacgccctcacaccacctcccacaacccctgagtgggtcaagttctgccgtcagcttttcggggggttctccatcctgctgtggattggggctatcctctgcttcctggcctacggcatccaggctgccatggaggatgaaccatccaacgacaatctatatctgggtgtggtgctggcagctgtggtcattgtcactggctgcttctcctactaccaggaggccaagagctccaagatcatggattccttcaagaacatggtacctcagcaagcccttgtgatccgggagggagagaagatgcagatcaacgcagaggaagtggtggtgggagacctggtggaggtgaagggtggagaccgcgtccctgctgacctccggatcatctcttctcatggctgtaaggtggataactcatccttaacaggagagtcggagccccagacccgctcccccgagttcacccatgagaaccccctggagacccgcaatatctgtttcttctccaccaactgtgttgaaggcactgccaggggcattgtgattgccacaggagaccggacggtgatgggccgcatagctactctcgcctcaggcctggaggttgggcggacacccatagcaatggagattgaacacttcatccagctgatcacaggggtcgctgtattcctgggggtctccttcttcgtgctctccctcatcctgggctacagctggctggaggcagtcatcttcctcatcggcatcatagtggccaacgtgcctgaggggcttctggccactgtcactgtgtgcctgaccctgacagccaagcgcatggcacggaagaactgcctggtgaagaacctggaggcggtggagacgctgggctccacgtccaccatctgctcggacaagacgggcaccctcacccagaaccgcatgaccgtcgcccacatgtggttcgacaaccaaatccatgaggctgacaccaccgaagatcagtctggggccacttttgacaaacgatcccctacgtggacggccctgtctcgaattgctggtctctgcaaccgcgccgtcttcaaggcaggacaggagaacatctccgtgtctaagcgggacacagctggtgatgcctctgagtcagctctgctcaagtgcattgagctctcctgtggctcagtgaggaaaatgagagacagaaaccccaaggtggcagagattcctttcaactctaccaacaagtaccagctgtctatccacgagcgagaagacagcccccagagccacgtgctggtgatgaagggggccccagagcgcattctggaccggtgctccaccatcctggtgcagggcaaggagatcccgctcgacaaggagatgcaagatgcctttcaaaatgcctacatggagctggggggacttggggagcgtgtgctgggattctgtcaactgaatctgccatctggaaagtttcctcggggcttcaaattcgacacggatgagctgaactttcccacggagaagctttgctttgtggggctcatgtctatgattgaccctccccgggctgctgtgccagatgctgtgggcaagtgccgaagcgcaggcatcaaggtgatcatggtaaccggggatcaccctatcacagccaaggccattgccaaaggcgtgggcatcatatcagagggtaacgagactgtggaggacattgcagcccggctcaacattcccatgagtcaagtcaaccccagagaagccaaggcatgcgtggtgcacggctctgacctgaaggacatgacatcggagcagctcgatgagatcctcaagaaccacacagagatcgtctttgctcgaacgtctccccagcagaagctcatcattgtggagggatgtcagaggcagggagccattgtggccgtgacgggtgacggggtgaacgactcccctgcattgaagaaggctgacattggcattgccatgggcatctctggctctgacgtctctaagcaggcagccgacatgatcctgctggatgacaactttgcctccatcgtcacgggggtggaggagggccgcctgatctttgacaacttgaagaaatccatcgcctacaccctgaccagcaacatccccgagatcacccccttcctgctgttcatcattgccaacatccccctacctctgggcactgtgaccatcctttgcattgacctgggcacagatatggtccctgccatctccttggcctatgaggcagctgagagtgatatcatgaagcggcagccacgaaactcccagacggacaagctggtgaatgagaggctcatcagcatggcctacggacagatcgggatgatccaggcactgggtggcttcttcacctactttgtgatcctggcagagaacggtttcctgccatcacggctactgggaatccgcctcgactgggatgaccggaccatgaatgatctggaggacagctatggacaggagtggacctatgagcagcggaaggtggtggagttcacgtgccacacggcattctttgccagcatcgtggtggtgcagtgggctgacctcatcatctgcaagacccgccgcaactcagtcttccagcagggcatgaagaacaagatcctgatttttgggctcctggaggagacggcgttggctgcctttctctcttactgcccaggcatgggtgtagccctccgcatgtacccgctcaaagtcacctggtggttctgcgccttcccctacagcctcctcatcttcatctatgatgaggtccgaaagctcatcctgcggcggtatcctggtggctgggtggagaaggagacatactactgaccccattggaagaagaaccaggcatggaaagatggggagctctggaggtgttgtggggatggtgatggagagggatggaaataacgggtggcattgggtggcaacatttggggagagataatgaggcaactcagcaggctaagttgcggggtatataaattggggtgatgaccccatagacctaactgtgaacaatcagattagacactatgtgttagagtccccccgaccagatccttttccatcccactccactatgttgtctattttttctgaggaattaagggttaccccaccctgcccactcccatcccttcaaccccacttcctactgtaatagatcagcatccaaaagcaggaacccatctaaaccagaaggaagccctctcagatcaccccagcctcactccatttcccacttccacccccgttagcttcctgcaggactctatccctggcttccccttcagaccttgcaatcacaaaaggttcttctggtgagtgcaagagcctgagactggaaaaggtggacttgtctcccagtcgaggctggtaagggaccttcagggagagctgggcagacaggtgggagatggaggtagggctggctggaggaaggaaacaacaaaggaagtgaggtagtgccaatgacaggacatttgacatgagtctccagatagatgtcgtggactccagctctacgtcccacattttagaataccccaccagcagaacaaactcagatctcatcagggtagcagcagaggcaggaccagaaggcaatcaagagcttccagaaatgccacacttgtgtgccacagagttccccgctgacccttggttaggggtcctcttagtccacaaggtccggatgtcactcatgtacttaataacacttcaccttctgtaatactaagtcctcagagctccatgctgttctgaaagggatggccacaagttctttcccagcctcttccattccctttcttttcatgcccatcccgatgaacctgcatcattccccgacactgccaagccaacccttcctgtctcccagggacatgtatgcttccagggacaagcttaggtcatgaacatggtcagaacctttggacaagaggaaaaatactaagagatttgctttttctgggtgcggtggctcatgcctgtaatcccagcactttgggaggccgaggcaggtggatcatgaggtcaggagttcgaggcgagcctggccaacatggtgaaaccctgtctctactaaaagtacaaaaaattagccagtcatggtggcacacgcctgtaatctcagctactcaggaggctgaggcaggagaattgcttgaacctgtgaggaagaggttgcagtgagctgagatcgtgccattacactccagcctgggcgaaagggtgagactccatctcaaaaaaaaaaaaaatgatttgcttttgacgtctccattctctaagcctggcttagaaggcactgggaatgtcctgtagagagagacctagataggtcatgcaagtgagaaagacatctgaggaa

SEQ ID NO: 578 - DNA, 5510 bp, Homo sapiens
tctctgtctgccagggtctccgactgtcccagacgggctggtgtgggcttgggatcctcctggtgacctctcccgctaaggtccctcagccactctgccccaagatgggccgtggggctggccgtgagtactcacctgccgccaccacggcagagaatgggggcggcaagaagaaacagaaggagaaggaactggatgagctgaagaaggaggtggcaatggatgaccacaagctgtccttggatgagctgggccgcaaataccaagtggacctgtccaagggcctcaccaaccagcgggctcaggacgttctggctcgagatgggcccaacgccctcacaccacctcccacaacccctgagtgggtcaagttctgccgtcagcttttcggggggttctccatcctgctgtggattggggctatcctctgcttcctggcctacggcatccaggctgccatggaggatgaaccatccaacgacaatctatatctgggtgtggtgctggcagctgtggtcattgtcactggctgcttctcctactaccaggaggccaagagctccaagatcatggattccttcaagaacatggtacctcagcaagcccttgtgatccgggagggagagaagatgcagatcaacgcagaggaagtggtggtgggagacctggtggaggtgaagggtggagaccgcgtccctgctgacctccggatcatctcttctcatggctgtaaggtggataactcatccttaacaggagagtcggagccccagacccgctcccccgagttcacccatgagaaccccctggagacccgcaatatctgtttcttctccaccaactgtgttgaaggcactgccaggggcattgtgattgccacaggagaccggacggtgatgggccgcatagctactctcgcctcaggcctggaggttgggcggacacccatagcaatggagattgaacacttcatccagctgatcacaggggtcgctgtattcctgggggtctccttcttcgtgctctccctcatcctgggctacagctggctggaggcagtcatcttcctcatcggcatcatagtggccaacgtgcctgaggggcttctggccactgtcactgtgtgcctgaccctgacagccaagcgcatggcacggaagaactgcctggtgaagaacctggaggcggtggagacgctgggctccacgtccaccatctgctcggacaagacgggcaccctcacccagaaccgcatgaccgtcgcccacatgtggttcgacaaccaaatccatgaggctgacaccaccgaagatcagtctggggccacttttgacaaacgatcccctacgtggacggccctgtctcgaattgctggtctctgcaaccgcgccgtcttcaaggcaggacaggagaacatctccgtgtctaagcgggacacagctggtgatgcctctgagtcagctctgctcaagtgcattgagctctcctgtggctcagtgaggaaaatgagagacagaaaccccaaggtggcagagattcctttcaactctaccaacaagtaccagctgtctatccacgagcgagaagacagcccccagagccacgtgctggtgatgaagggggccccagagcgcattctggaccggtgctccaccatcctggtgcagggcaaggagatcccgctcgacaaggagatgcaagatgcctttcaaaatgcctacatggagctggggggacttggggagcgtgtgctgggattctgtcaactgaatctgccatctggaaagtttcctcggggcttcaaattcgacacggatgagctgaactttcccacggagaagctttgctttgtggggctcatgtctatgattgaccctccccgggctgctgtgccagatgctgtgggcaagtgccgaagcgcaggcatcaaggtgatcatggtaaccggggatcaccctatcacagccaaggccattgccaaaggcgtgggcatcatatcagagggtaacgagactgtggaggacattgcagcccggctcaacattcccatgagtcaagtcaaccccagagaagccaaggcatgcgtggtgcacggctctgacctgaaggacatgacatcggagcagctcgatgagatcctcaagaaccacacagagatcgtctttgctcgaacgtctccccagcagaagctcatcattgtggagggatgtcagaggcagggagccattgtggccgtgacgggtgacggggtgaacgactcccctgcattgaagaaggctgacattggcattgccatgggcatctctggctctgacgtctctaagcaggcagccgacatgatcctgctggatgacaactttgcctccatcgtcacgggggtggaggagggccgcctgatctttgacaacttgaagaaatccatcgcctacaccctgaccagcaacatccccgagatcacccccttcctgctgttcatcattgccaacatccccctacctctgggcactgtgaccatcctttgcattgacctgggcacagatatggtccctgccatctccttggcctatgaggcagctgagagtgatatcatgaagcggcagccacgaaactcccagacggacaagctggtgaatgagaggctcatcagcatggcctacggacagatcgggatgatccaggcactgggtggcttcttcacctactttgtgatcctggcagagaacggtttcctgccatcacggctactgggaatccgcctcgactgggatgaccggaccatgaatgatctggaggacagctatggacaggagtggacctatgagcagcggaaggtggtggagttcacgtgccacacggcattctttgccagcatcgtggtggtgcagtgggctgacctcatcatctgcaagacccgccgcaactcagtcttccagcagggcatgaagaacaagatcctgatttttgggctcctggaggagacggcgttggctgcctttctctcttactgcccaggcatgggtgtagccctccgcatgtacccgctcaaagtcacctggtggttctgcgccttcccctacagcctcctcatcttcatctatgatgaggtccgaaagctcatcctgcggcggtatcctggtggctgggtggagaaggagacatactactgaccccattggaagaagaaccaggcatggaaagatggggagctctggaggtgttgtggggatggtgatggagagggatggaaataacgggtggcattgggtggcaacatttggggagagataatgaggcaactcagcaggctaagttgcggggtatataaattggggtgatgaccccatagacctaactgtgaacaatcagattagacactatgtgttagagtccccccgaccagatccttttccatcccactccactatgttgtctattttttctgaggaattaagggttaccccaccctgcccactcccatcccttcaaccccacttcctactgtaatagatcagcatccaaaagcaggaacccatctaaaccagaaggaagccctctcagatcaccccagcctcactccatttcccacttccacccccgttagcttcctgcaggactctatccctggcttccccttcagaccttgcaatcacaaaaggttcttctggtgagtgcaagagcctgagactggaaaaggtggacttgtctcccagtcgaggctggtaagggaccttcagggagagctgggcagacaggtgggagatggaggtagggctggctggaggaaggaaacaacaaaggaagtgaggtagtgccaatgacaggacatttgacatgagtctccagatagatgtcgtggactccagctctacgtcccacattttagaataccccaccagcagaacaaactcagatctcatcagggtagcagcagaggcaggaccagaaggcaatcaagagcttccagaaatgccacacttgtgtgccacagagttccccgctgacccttggttaggggtcctcttagtccacaaggtccggatgtcactcatgtacttaataacacttcaccttctgtaatactaagtcctcagagctccatgctgttctgaaagggatggccacaagttctttcccagcctcttccattccctttcttttcatgcccatcccgatgaacctgcatcattccccgacactgccaagccaaccctggaaaaggagttcgctggccattggctagaatcagggtggagaagttccctgaaccttcctgtctcccagggacatgtatgcttccagggacaagcttaggtcatgaacatggtcagaacctttggacaagaggaaaaatactaagagatttgctttttctgggtgcggtggctcatgcctgtaatcccagcactttgggaggccgaggcaggtggatcatgaggtcaggagttcgaggcgagcctggccaacatggtgaaaccctgtctctactaaaagtacaaaaaattagccagtcatggtggcacacgcctgtaatctcagctactcaggaggctgaggcaggagaattgcttgaacctgtgaggaagaggttgcagtgagctgagatcgtgccattacactccagcctgggcgaaagggtgagactccatctcaaaaaaaaaaaaaatgatttgcttttgacgtcttaggtggcagggctgttccctccaggcaaatgcccttcaaaccgacgatcattgtgcccacttaccctgggctggagagttggtttcaggttcctacaggagatagctttctttcccttactccctatctaacacttttgctctgcaggcagccttgcccattctctaagcctggcttagaaggcactgggaatgtcctgtagagagagacctagataggtcatgcaagtgagaaagacatctgaggaaaatggaagacctaaggcagacaggaaggaagcacaaaagacaagcattgggtcagacccataaaccacctcccaaaggctgtcatttcattgcactggaattttgctttatcagaagcaaggaagtaagggagtcattgccttgggcctgggaatctaagtgggagacaatattaatttggatccgattaattggagattactaactgtggacaaaagtttatctttgcacaatcaataaaaatggcatttttttagtaaattaagagcataaacaatattgctagaggtggcatgtttagtctaccaaaaacaatacttttcaggcactttagaaatatccttttagaagcagcgagtgcatgggctaattatcatcaatctttatgtatttgttaaagaaacatctacaggatctttattggtgaccttttgtaagacattagtttgaggtactacctatgtacttgaaaataataaagtggcatttctttatgaaaaaaaaagaaatctcttccataattcagatttctacactttatacttgcctccctcctaaatcgtgatattgaaatatgtg

SEQ ID NO: 579 - DNA, 3345 bp, Homo sapiens
atgtgcagacggcggtgcgcatgctctgttgcggtccgcttcggtttctgttgcgggacccggggtgtctcctagcgcaaccggaactagccttctgggggccggcttcctttatctctggcggccttgtagtcgtctccgagactccccacccctccttccctcttgaccccctaggtttgattgccctttccccgaaacaactatcatgagcgcgaggctgccggtgttgtctccacctcggtggccgcggctgttgctgctgtcgctgctcctgctgggggcggttcctggcccgcgccggagcggcgctttctacctgcccggcctggcgcccgtcaacttctgcgacgaagaaaaaaagagcgacgagtgcaaggccgaaatagaactatttgtgaacagacttgattcagtggaatcagttcttccttatgaatacacagcgtttgatttttgccaagcatcagaaggaaagcgcccatctgaaaatcttggtcaggtactattcggggaaagaattgaaccttcaccatataagtttacgtttaataagaaggagacctgtaagcttgtttgtacaaaaacataccatacagagaaagctgaagacaaacaaaagttagaattcttgaaaaaaagcatgttattgaattatcaacatcactggattgtggataatatgcctgtaacgtggtgttacgatgttgaagatggtcagaggttctgtaatcctggatttcctattggctgttacattacagataaaggccatgcaaaagatgcctgtgttattagttcagatttccatgaaagagatacattttacatcttcaaccatgttgacatcaaaatatactatcatgttgttgaaactgggtccatgggagcaagattagtggctgctaaacttgaaccgaaaagcttcaaacatacccatatagataaaccagactgctcagggccccccatggacataagtaacaaggcttctggggagataaaaattgcctatacttactctgttagcttcgaggaagatgataagatcagatgggcgtctagatgggactatattctggagtctatgcctcatacccacattcagtggtttagcattatgaattccctggtcattgttctcttcttatctggaatggtagctatgattatgttacggacactgcacaaagatattgctagatataatcagatggactctacggaagatgcccaggaagaatttggctggaaacttgttcatggtgatatattccgtcctccaagaaaagggatgctgctatcagtctttctaggatccgggacacagattttaattatgacctttgtgactctatttttcgcttgcctgggatttttgtcacctgccaaccgaggagcgctgatgacgtgtgctgtggtcctgtgggtgctgctgggcacccctgcaggctatgttgctgccagattctataagtcctttggaggtgagaagtggaaaacaaatgttttattaacatcatttctttgtcctgggattgtatttgctgacttctttataatgaatctgatcctctggggagaaggatcttcagcagctattccttttgggacactggttgccatattggccctttggttctgcatatctgtgcctctgacgtttattggtgcatactttggttttaagaagaatgccattgaacacccagttcgaaccaatcagattccacgtcagattcctgaacagtcgttctacacgaagcccttgcctggtattatcatgggagggattttgccctttggctgcatctttatacaacttttcttcattctgaatagtatttggtcacaccagatgtattacatgtttggcttcctatttctggtgtttatcattttggttattacctgttctgaagcaactatacttctttgctatttccacctatgtgcagaggattatcattggcaatggcgttcattccttacgagtggctttactgcagtttatttcttaatctatgcagtacactacttcttttcaaaactgcagatcacgggaacagcaagcacaattctgtactttggttataccatgataatggttttgatcttctttctttttacaggaacaattggcttctttgcatgcttttggtttgttaccaaaatatacagtgtggtgaaggttgactgaagaagtccagtgtgtccagttaaaacagaaataaattaaactcttcatcaacaaagacctgtttttgtgactgccttgagttttatcagaattattggcctagtaatccttcagaaacaccgtaattctaaataaacctcttcccatacacctttcccccataagatgtgtcttcaacactataaagcatttgtattgtgatttgattaagtatatatttggttgttctcaatgaagagcaaatttaaatattatgtgcatttgtaaatacagtagctataaaattttccatacttctaatggcagaatagaggaggccatattaaataatactgatgaaaggcaggacactgcattgtaaataggattttctaggctcggtaggcagaaagaattatttttctttgaaggaaataactttttatcatggtaattttgaaggatgattcctatgatgtgttcaccaggggaatgtggcttttaaagaaaatcttctattggttgtaactgttcatatcttcttacttttctgtgttgacttcattattcccatggtattggccttttaaactatgtgcctctgagtctttcaatttataaatttgttatcttaataaatattataaaaatgtcttcattgcatcattacctattatatattcaaggaggttctgtaaatacagatctatttaccaaggtgttttgaaatgatttatactattttatcagattttactggattttgttaatgtaacactttctgagttttgatctgaatggaatttcactgtgtaaggcattgtctaaaatgttcactgtgaggcagtagaggaggttgaagtcatgcatatctagacagatgaattatctgcaagtacttaaggtggagccttactacattgtcattaaggagtttctatttttgacttgtttttcaaaatacagtgttttaagtcaggttttattacctggacattagcaatcactagcaagtcttcatctttatgatttcattgttttaatttagatttcacaaacagttttacttctaagagttaagaaatgcactgtctttcacattcatctgactaattgaaatccatttatgtagaatataggaatggggggtgattctgaagtatcgg

SEQ ID NO: 580 - DNA, 2271 bp, Homo sapiens
ctggtgcctgccttggggctccgggactgtgggctgtctccatccggaggtctccctaccaccaggctctgtggggcagggaagcccagtggggtgcagggagccaggaagctggggtggggtcagggcagggtccacagggagaccgggcgaggctggcagccttcccagtccgcgcagcgtctctgcagggggagcaagagctgcccttccacccctcccaggggacgggtaggggcactctgggcttttcccaccccctcacgcagggacacaggcctggtgggtctatgactgaaattggccagaccgcattctggtggttttattcggaagggaagtttaccctgttcagcagaagctgagatgggaacaggaaacccacagggcccctttattcggcaaaaatgtcagtcagcgccccggggagcagccgagggtccctgagtgtgtgagtgaggtggggaaacacagatggactttggggggctcccccttctacaggaaacccggagtggactggaatggtgcagggggagaactcgcccctcccatcgggcgcctccttcataccggcccttcccctcggctttgcctggacagctcctgcctcccgcagggcccacctgtgtcccccagcgccgctccacccagcaggcctgagcccctctctgctgccagacaccccctgctgcccactctcctgctgctcgggttctgaggcacagcttgtcacaccgaggcggattctctttctctttctctttctcttctggcccacagccgcagcaatggcgctgagttcctctgctggagttcatcctgctagctgggttcccgagctgccggtctgagcctgaggcatggagcctcctggagactgggggcctcctccctggagatccacccccaaaaccgacgtcttgaggctggtgctgtatctcaccttcctgggagccccctgctacgccccagctctgccgtcctgcaaggaggacgagtacccagtgggctccgagtgctgccccaagtgcagtccaggttatcgtgtgaaggaggcctgcggggagctgacgggcacagtgtgtgaaccctgccctccaggcacctacattgcccacctcaatggcctaagcaagtgtctgcagtgccaaatgtgtgacccagccatgggcctgcgcgcgagccggaactgctccaggacagagaacgccgtgtgtggctgcagcccaggccacttctgcatcgtccaggacggggaccactgcgccgcgtgccgcgcttacgccacctccagcccgggccagagggtgcagaagggaggcaccgagagtcaggacaccctgtgtcagaactgccccccggggaccttctctcccaatgggaccctggaggaatgtcagcaccagaccaagtgcagctggctggtgacgaaggccggagctgggaccagcagctcccactgggtatggtggtttctctcagggagcctcgtcatcgtcattgtttgctccacagttggcctaatcatatgtgtgaaaagaagaaagccaaggggtgatgtagtcaaggtgatcgtctccgtccagcggaaaagacaggaggcagaaggtgaggccacagtcattgaggccctgcaggcccctccggacgtcaccacggtggccgtggaggagacaataccctcattcacggggaggagcccaaaccactgacccacagactctgcaccccgacgccagagatacctggagcgacggctgctgaaagaggctgtccacctggcggaaccaccggagcccggaggcttgggggctccgccctgggctggcttccgtctcctccagtggagggagaggtggggcccctgctggggtagagctggggacgccacgtgccattcccatgggccagtgagggcctggggcctctgttctgctgtggcctgagctccccagagtcctgaggaggagcgccagttgcccctcgctcacagaccacacacccagccctcctgggccagcccagagggcccttcagaccccagctgtctgcgcgtctgactcttgtggcctcagcaggacaggccccgggcactgcctcacagccaaggctggactgggttggctgcagtgtggtgtttagtggataccacatcggaagtgattttctaaattggatttgaattcggctcctgttttctatttgtcatgaaacagtgtatttggggagatgctgtgggaggatgtaaatatcttgtttctcctcaaa

SEQ ID NO: 581 - DNA, 1550 bp, Homo sapiens
cacgagggactcactggtgcctgccttggggctccgggactgtgggctgtctccatccggagccgcagcaatggcgctgagttcctctgctggagttcatcctgctagctgggttcccgagctgccggtctgagcctgaggcatggagcctcctggagactgggggcctcctccctggagatccacccccaaaaccgacgtcttgaggctggtgctgtatctcaccttcctgggagccccctgctacgccccagctctgccgtcctgcaaggaggacgagtacccagtgggctccgagtgctgccccaagtgcagtccaggttatcgtgtgaaggaggcctgcggggagctgacgggcacagtgtgtgaaccctgccctccaggcacctacattgcccacctcaatggcctaagcaagtgtctgcagtgccaaatgtgtgacccagccatgggcctgcgcgcgagccggaactgctccaggacagagaacgccgtgtgtggctgcagcccaggccacttctgcatcgtccaggacggggaccactgcgccgcgtgccgcgcttacgccacctccagcccgggccagagggtgcagaagggaggcaccgagagtcaggacaccctgtgtcagaactgccccccggggaccttctctcccaatgggaccctggaggaatgtcagcaccagaccaagtgcagctggctggtgacgaaggccggagctgggaccagcagctcccactgggtatggtggtttctctcagggagcctcgtcatcgtcattgtttgctccacagttggcctaatcatatgtgtgaaaagaagaaagccaaggggtgatgtagtcaaggtgatcgtctccgtccagcggaaaagacaggaggcagaaggtgaggccacagtcattgaggccctgcaggcccctccggacgtcaccacggtggccgtggaggagacaataccctcattcacggggaggagcccaaaccactgacccacagactctgcaccccgacgccagagatacctggagcgacggctgctgaaagaggctgtccacctggcggaaccaccggagcccggaggcttgggggctccgccctgggctggcttccgtctcctccagtggagggagaggtggggcccctgctggggtagagctggggacgccacgtgccattcccatgggccagtgagggcctggggcctctgttctgctgtggcctgagctccccagagtcctgaggaggagcgccagttgcccctcgctcacagaccacacacccagccctcctgggccagcccagagggcccttcagaccccagctgtctgcgcgtctgactcttgtggcctcagcaggacaggccccgggcactgcctcacagccaaggctggactgggttggctgcagtgtggtgtttagtggataccacatcggaagtgattttctaaattggatttgaattcggctcctgttttctatttgtcatgaaacagtgtatttggggagatgctgtgggaggatgtaaatatcttgtttctcctcaaa

SEQ ID NO: 582 - DNA, 1517 bp, Homo sapiens
ctgggacctgctctgggcaagcacaggcgccgcagcaatggcgctgagttcctctgctggagttcatcctgctagctgggttcccgagctgccggtctgagcctgaggcatggagcctcctggagactgggggcctcctccctggagatccacccccaaaaccgacgtcttgaggctggtgctgtatctcaccttcctgggagccccctgctacgccccagctctgccgtcctgcaaggaggacgagtacccagtgggctccgagtgctgccccaagtgcagtccaggttatcgtgtgaaggaggcctgcggggagctgacgggcacagtgtgtgaaccctgccctccaggcacctacattgcccacctcaatggcctaagcaagtgtctgcagtgccaaatgtgtgacccagccatgggcctgcgcgcgagccggaactgctccaggacagagaacgccgtgtgtggctgcagcccaggccacttctgcatcgtccaggacggggaccactgcgccgcgtgccgcgcttacgccacctccagcccgggccagagggtgcagaagggaggcaccgagagtcaggacaccctgtgtcagaactgccccccggggaccttctctcccaatgggaccctggaggaatgtcagcaccagaccaagtgcagctggctggtgacgaaggccggagctgggaccagcagctcccactgggtatggtggtttctctcagggagcctcgtcatcgtcattgtttgctccacagttggcctaatcatatgtgtgaaaagaagaaagccaaggggtgatgtagtcaaggtgatcgtctccgtccagcggaaaagacaggaggcagaaggtgaggccacagtcattgaggccctgcaggcccctccggacgtcaccacggtggccgtggaggagacaataccctcattcacggggaggagcccaaaccactgacccacagactctgcaccccgacgccagagatacctggagcgacggctgctgaaagaggctgtccacctggcggaaccaccggagcccggaggcttgggggctccgccctgggctggcttccgtctcctccagtggagggagaggtggggcccctgctggggtagagctggggacgccacgtgccattcccatgggccagtgagggcctggggcctctgttctgctgtggcctgagctccccagagtcctgaggaggagcgccagttgcccctcgctcacagaccacacacccagccctcctgggccagcccagagggcccttcagaccccagctgtctgcgcgtctgactcttgtggcctcagcaggacaggccccgggcactgcctcacagccaaggctggactgggttggctgcagtgtggtgtttagtggataccacatcggaagtgattttctaaattggatttgaattcggctcctgttttctatttgtcatgaaacagtgtatttggggagatgctgtgggaggatgtaaatatcttgtttctcctcaaa

SEQ ID NO: 583 - DNA, 1558 bp, Homo sapiens
ctggtgcctgccttggggctccgggactgtgggctgtctccatccggaggtctccctaccaccaggctctccgcagcaatggcgctgagttcctctgctggagttcatcctgctagctgggttcccgagctgccggtctgagcctgaggcatggagcctcctggagactgggggcctcctccctggagatccacccccaaaaccgacgtcttgaggctggtgctgtatctcaccttcctgggagccccctgctacgccccagctctgccgtcctgcaaggaggacgagtacccagtgggctccgagtgctgccccaagtgcagtccaggttatcgtgtgaaggaggcctgcggggagctgacgggcacagtgtgtgaaccctgccctccaggcacctacattgcccacctcaatggcctaagcaagtgtctgcagtgccaaatgtgtgacccagccatgggcctgcgcgcgagccggaactgctccaggacagagaacgccgtgtgtggctgcagcccaggccacttctgcatcgtccaggacggggaccactgcgccgcgtgccgcgcttacgccacctccagcccgggccagagggtgcagaagggaggcaccgagagtcaggacaccctgtgtcagaactgccccccggggaccttctctcccaatgggaccctggaggaatgtcagcaccagaccaagtgcagctggctggtgacgaaggccggagctgggaccagcagctcccactgggtatggtggtttctctcagggagcctcgtcatcgtcattgtttgctccacagttggcctaatcatatgtgtgaaaagaagaaagccaaggggtgatgtagtcaaggtgatcgtctccgtccagcggaaaagacaggaggcagaaggtgaggccacagtcattgaggccctgcaggcccctccggacgtcaccacggtggccgtggaggagacaataccctcattcacggggaggagcccaaaccactgacccacagactctgcaccccgacgccagagatacctggagcgacggctgctgaaagaggctgtccacctggcggaaccaccggagcccggaggcttgggggctccgccctgggctggcttccgtctcctccagtggagggagaggtggggcccctgctggggtagagctggggacgccacgtgccattcccatgggccagtgagggcctggggcctctgttctgctgtggcctgagctccccagagtcctgaggaggagcgccagttgcccctcgctcacagaccacacacccagccctcctgggccagcccagagggcccttcagaccccagctgtctgcgcgtctgactcttgtggcctcagcaggacaggccccgggcactgcctcacagccaaggctggactgggttggctgcagtgtggtgtttagtggataccacatcggaagtgattttctaaattggatttgaattcggctcctgttttctatttgtcatgaaacagtgtatttggggagatgctgtgggaggatgtaaatatcttgtttctcctcaaa

SEQ ID NO: 584 - DNA, 3459 bp, Homo sapiens
ctggtgcctgccttggggctccgggactgtgggctgtctccatccggaggtctccctaccaccaggctctgtggggcagggaagcccagtggggtgcagggagccaggaagctggggtggggtcagggcagggtccacagggagaccgggcgaggctggcagccttcccagtccgcgcagcgtctctgcagggggagcaagagctgcccttccacccctcccaggggacgggtaggggcactctgggcttttcccaccccctcacgcagggacacaggcctggtgggtctatgactgaaattggccagaccgcattctggtggttttattcggaagggaagtttaccctgttcagcagaagctgagatgggaacaggaaacccacagggcccctttattcggcaaaaatgtcagtcagcgccccggggagcagccgagggtccctgagtgtgtgagtgaggtggggaaacacagatggactttggggggctcccccttctacaggaaacccggagtggactggaatggtgcagggggagaactcgcccctcccatcgggcgcctccttcataccggcccttcccctcggctttgcctggacagctcctgcctcccgcagggcccacctgtgtcccccagcgccgctccacccagcaggcctgagcccctctctgctgccagacaccccctgctgcccactctcctgctgctcgggttctgaggcacagcttgtcacaccgaggcggattctctttctctttctctttctcttctggcccacagccgcagcaatggcgctgagttcctctgctggagttcatcctgctagctgggttcccgagctgccggtctgagcctgaggcatggagcctcctggagactgggggcctcctccctggagatccacccccaaaaccgacgtcttgaggctggtgctgtatctcaccttcctgggagccccctgctacgccccagctctgccgtcctgcaaggaggacgagtacccagtgggctccgagtgctgccccaagtgcagtccaggttatcgtgtgaaggaggcctgcggggagctgacgggcacagtgtgtgaaccctgccctccaggcacctacattgcccacctcaatggcctaagcaagtgtctgcagtgccaaatgtgtgacccaggtaagaggccagcacagccggcccagcctccgcttgggcagcctggatgcccccgcaccctgcaccctctctccatggccacagtgccccaggaaggccccggctgccccaggccaggtcccaaccccatctccatggatgcaccctgcaggggacgccttgaggtcagcctccggcccccgtccacctctgtctcacctctcactttgtcaccgccaggtgggccatcctgagcttggcgactgacccttatccctcgtccttggctcctctggtgcccggggtgggtgcccagacctctcctgtgcccacgtccctagctgcaaagtggaatgggatggtgctgggactctccggccggcactcgggcctgctgcttccccacagggcttcttgtccctttctcctccagatattggttccccctgtgacctcaggggaagaggtcacctggaggctggtgcccacctgagtccaggcagacagaaaggggaaccagacccagaggtggcctttgagtcactgagcgcagagcctgtccatgcggccaacggctctgtccccttggagcctcatgccaggctcagcatggccagtgctccctgcggccaggcaggactgcacctgcgggacagggctgacggcacacctgggggcagggcctgagcctacagggaggcacagggcaggtgggctagccatgaacagaagaggaagctggagtgctttgggggttcatgcatgtaggctgggatttggggctcacacctcaacctgcatgcccagttccatgcccctcccctcttgtgaaagcacctgtctacttgggctgaggatgtgggggcacaggtggcaggtgaggctgccctcaggaggggcccaggcccagcttgtaccccacctccaccagtacctgaagaagtggggctctcaccctacctgcctctgccattggaatggcctggtttgcacagatgggaaacccgtttgcggggtgggtgtctgggtgggcacgtggggcgaggacctgcctgcgggaccctgccctggaactgacagtgcaagctcggcgtcctgcccatctgggcagaaggctggtttctcccatcaacgaagccctcccaggaccttcctgcaagccctcgtcccacacgcagctctgccgtcccttggtgtccctcccggcctcaggtcctccatgctgggtacctctgggcacctcgtttggctgagccaggggttcagcctggcagggcgccctggcagcagtccttggcctgtggatgctgtcctggcccgtggatggtgtcccggcctccacgtacccctctcagcccctcctcttggactccagccatgggcctgcgcgcgagccggaactgctccaggacagagaacgccgtgtgtggctgcagcccaggccacttctgcatcgtccaggacggggaccactgcgccgcgtgccgcgcttacgccacctccagcccgggccagagggtgcagaagggaggcaccgagagtcaggacaccctgtgtcagaactgccccccggggaccttctctcccaatgggaccctggaggaatgtcagcaccagaccaagtgcagctggctggtgacgaaggccggagctgggaccagcagctcccactgggtatggtggtttctctcagggagcctcgtcatcgtcattgtttgctccacagttggcctaatcatatgtgtgaaaagaagaaagccaaggggtgatgtagtcaaggtgatcgtctccgtccaggccaagtgtggagaaatcaatgatgttgacgatgaggctccctgagagaaatcacacccagcgggagctgctgctcccaggtctggcctcggtcaccagccacctgctgcatccgcgggagtggggccgaggacatgggagtggcaggtgcagcccccggtactcactcagccccagggagtgtccctggctcccagggctctgggaggtgagggcaggtcccgggggaggctgggttagtggcagctccgggatgagacctcagaggtctgtctgacttgtccaagcccggctatggggaggtggggggaaggaaggaagaggaagaagtgggaggcagccagcagcgcagggccctgagagtatttcagcggcaccgctgtcctgggccgcccggtgccacatctttgaaaacagttgtttaatttaagcttgtccactcagtagctgttgaatgtgggaggttatcttgttctattcaagttgctataaaaataaaaactaccatagactggg

SEQ ID NO: 585 - DNA, 2492 bp, Homo sapiens
cacgagggactcactggtgcctgccttggggctccgggactgtgggctgtctccatccggagccgcagcaatggcgctgagttcctctgctggagttcatcctgctagctgggttcccgagctgccggtctgagcctgaggcatggagcctcctggagactgggggcctcctccctggagatccacccccaaaaccgacgtcttgaggctggtgctgtatctcaccttcctgggagccccctgctacgccccagctctgccgtcctgcaaggaggacgagtacccagtgggctccgagtgctgccccaagtgcagtccaggttatcgtgtgaaggaggcctgcggggagctgacgggcacagtgtgtgaaccctgccctccaggcacctacattgcccacctcaatggcctaagcaagtgtctgcagtgccaaatgtgtgacccagatattggttccccctgtgacctcaggggaagaggtcacctggaggctggtgcccacctgagtccaggcagacagaaaggggaaccagacccagaggtggcctttgagtcactgagcgcagagcctgtccatgcggccaacggctctgtccccttggagcctcatgccaggctcagcatggccagtgctccctgcggccaggcaggactgcacctgcgggacagggctgacggcacacctgggggcagggcctgagcctacagggaggcacagggcaggtgggctagccatgaacagaagaggaagctggagtgctttgggggttcatgcatgtaggctgggatttggggctcacacctcaacctgcatgcccagttccatgcccctcccctcttgtgaaagcacctgtctacttgggctgaggatgtgggggcacaggtggcaggtgaggctgccctcaggaggggcccaggcccagcttgtaccccacctccaccagtacctgaagaagtggggctctcaccctacctgcctctgccattggaatggcctggtttgcacagatgggaaacccgtttgcggggtgggtgtctgggtgggcacgtggggcgaggacctgcctgcgggaccctgccctggaactgacagtgcaagctcggcgtcctgcccatctgggcagaaggctggtttctcccatcaacgaagccctcccaggaccttcctgcaagccctcgtcccacacgcagctctgccgtcccttggtgtccctcccggcctcaggtcctccatgctgggtacctctgggcacctcgtttggctgagccaggggttcagcctggcagggcgccctggcagcagtccttggcctgtggatgctgtcctggcccgtggatggtgtcccggcctccacgtacccctctcagcccctcctcttggactccagccatgggcctgcgcgcgagccggaactgctccaggacagagaacgccgtgtgtggctgcagcccaggccacttctgcatcgtccaggacggggaccactgcgccgcgtgccgcgcttacgccacctccagcccgggccagagggtgcagaagggaggcaccgagagtcaggacaccctgtgtcagaactgccccccggggaccttctctcccaatgggaccctggaggaatgtcagcaccagaccaagtgcagctggctggtgacgaaggccggagctgggaccagcagctcccactgggtatggtggtttctctcagggagcctcgtcatcgtcattgtttgctccacagttggcctaatcatatgtgtgaaaagaagaaagccaaggggtgatgtagtcaaggtgatcgtctccgtccagcggaaaagacaggaggcagaaggtgaggccacagtcattgaggccctgcaggcccctccggacgtcaccacggtggccgtggaggagacaataccctcattcacggggaggagcccaaaccactgacccacagactctgcaccccgacgccagagatacctggagcgacggctgctgaaagaggctgtccacctggcggaaccaccggagcccggaggcttgggggctccgccctgggctggcttccgtctcctccagtggagggagaggtggggcccctgctggggtagagctggggacgccacgtgccattcccatgggccagtgagggcctggggcctctgttctgctgtggcctgagctccccagagtcctgaggaggagcgccagttgcccctcgctcacagaccacacacccagccctcctgggccagcccagagggcccttcagaccccagctgtctgcgcgtctgactcttgtggcctcagcaggacaggccccgggcactgcctcacagccaaggctggactgggttggctgcagtgtggtgtttagtggataccacatcggaagtgattttctaaattggatttgaattcggctcctgttttctatttgtcatgaaacagtgtatttggggagatgctgtgggaggatgtaaatatcttgtttctcctcaaa

SEQ ID NO: 586 - DNA, 3911 bp, Homo sapiens
cccaactcaaacaggcagataaagagagatcaaagagatgagcatgagatacagtcccctcgtgcccaaggagacagggtggttacagacatggaaaatctgagaataatcacctctgataaagatcacagaagctgcccgggaggtgtttggtaagcttggagttacgtttgtggggtggatgggcagaagtcagatttcatagcactgaggatgcagcacaaggagaagttcaagatcaattcctaagacaacaacttggcactaaaaaacataaactatgttctgaaggctttaccctggggacaagggaagggaggtgataacagcagaagtggcagccactggcgatcctttctttccatggtttggcttctactccaaagccacttatttgtgcattctacaaaaagtttcttgtcctttttgaaataaagctcttatcctaagctccattcacacctgcgtgataatgaaccagctagtacttactgtactcaggaagcatgcaaagttctgaatcttagaacagaaagtgaaagcaaaagtaaattccccttcagtcaaatctgcagcagcatgatttaagattaaattcatgtattgaaaatattgttcagaccccatgtgacataactggagccagtgcagtgccatgaagaactacgagattagcctggatattaacttgtcttctagagaatagatttcatgttccattcttctgcaatggttaattcacacagaaaaccaatgtttaacattcacagaggattttactgcttaacagccatcttgccccaaatatgcatttgttctcagttctcagtgccatctagttatcacttcactgaggatcctggggctttcccagtagccactaatggggaacgatttccttggcaggagctaaggctccccagtgtggtcattcctctccattatgacctctttgtccaccccaatctcacctctctggactttgttgcatctgagaagatcgaagtcttggtcagcaatgctacccagtttatcatcttgcacagcaaagatcttgaaatcacgaatgccacccttcagtcagaggaagattcaagatacatgaaaccaggaaaagaactgaaagttttgagttaccctgctcatgaacaaattgcactgctggttccagagaaacttacgcctcacctgaaatactatgtggctatggacttccaagccaagttaggtgatggctttgaagggttttataaaagcacatacagaactcttggtggtgaaacaagaattcttgcagtaacagattttgagccaacccaggcacgcatggctttcccttgctttgatgaaccgttgttcaaagccaacttttcaatcaagatacgaagagagagcaggcatattgcactatccaacatgccaaaggttaagacaattgaacttgaaggaggtcttttggaagatcactttgaaactactgtaaaaatgagtacataccttgtagcctacatagtttgtgatttccactctctgagtggcttcacttcatcaggggtcaaggtgtccatctatgcatccccagacaaacggaatcaaacacattatgctttgcaggcatcactgaagctacttgatttttatgaaaagtactttgatatctactatccactctccaaactggatttaattgctattcctgactttgcacctggagccatggaaaattggggcctcattacatatagggagacgtcactgctttttgaccccaagacctcttctgcttccgataaactgtgggtcaccagagtcatagcccatgaactggcgcaccagtggtttggcaacctggtcacaatggaatggtggaatgatatttggcttaaggagggttttgcaaaatacatggaacttatcgctgttaatgctacatatccagagctgcaatttgatgactattttttgaatgtgtgttttgaagtaattacaaaagattcattgaattcatcccgccctatctccaaaccagcggaaaccccgactcaaatacaggaaatgtttgatgaagtttcctataacaagggagcttgtattttgaatatgctcaaggattttctgggtgaggagaaattccagaaaggaataattcagtacttaaagaagttcagctatagaaatgctaagaatgatgacttgtggagcagtctgtcaaatagttgtttagaaagtgattttacatctggtggagtttgtcattcggatcccaagatgacaagtaacatgctcgcctttctgggggaaaatgcagaggtcaaagagatgatgactacatggactctccagaaaggaatccccctgctggtggttaaacaagacgggtgttcactccgactgcaacaggagcgcttcctccagggggttttccaggaagaccctgaatggagggccctgcaggagaggtacctgtggcatatcccattgacctactccacgagttcttctaatgtgatccacagacacattctaaaatcaaagacagatactctggatctacctgaaaagaccagttgggtgaaatttaatgtggactcaaatggttactacatcgttcactatgagggtcatggatgggaccaactcattacacagctgaatcagaaccacacacttctcagacctaaggacagagtaggtctgattcatgatgtgtttcagctagttggtgcagggagactgaccctagacaaagctcttgacatgacttactacctccaacatgaaacaagcagccccgcacttctcgaaggtctgagttacttggaatcgttttaccacatgatggacagaaggaatatttcagatatctctgaaaacctcaagcgttaccttcttcagtattttaagccagtgattgacaggcaaagctggagtgacaagggttcagtctgggacaggatgctccgctcggctctcttgaagctggcctgtgacctgaaccatgctccttgcatccagaaagctgctgaactcttctcccagtggatggaatccagtggaaaattaaatataccaacagatgttttaaagattgtgtattctgtgggtgctcagacaacagcaggatggaattaccttttagagcaatatgaactgtcaatgtcaagtgctgaacaaaacaaaattctgtatgctttgtcaacgagcaagcatcaggaaaagttactgaagttaattgaactaggaatggaaggaaaggttatcaagacacagaacttggcagctctccttcatgcgattgccagacgtccaaaggggcagcaactagcatgggattttgtaagagaaaattggacccatcttctgaaaaaatttgacttgggctcatatgacataaggatgatcatctctggcacaacagctcacttttcttccaaggataagttgcaagaggtgaaactattttttgaatctcttgaggctcaaggatcacatctggatatttttcaaactgttctggaaacgataaccaaaaatataaaatggctggagaagaatcttccgactctgaggacttggctaatggttaatacttaaatggtcaatagaaaaagtaggctgggcgcggtggctcacgcctgtaatcccagcactttgggaggctgagaagggcggatcacgaggtcaggagatggagaccatcctggctaacacggtgagaccccgtctccgctaaaaatacaaaaaattagccgggcatggtggcaggtgcctgtagtcccagctactcggcaggctgcagcaggaaaatggcataaacccgggaggtggagcttgcagtgagccgagattgcaccactgcattccagcctgggtgactgagcgagactctgtctcaaaaaaaaaaaaaaaaa

SEQ ID NO: 587 - DNA, 3322 bp, Homo sapiens
attaaattcatgtattgaaaatattgttcagaccccatgtgacataactggagccagtgcagtgccatgaagaactacgagattagcctggatattaacttgtcttctagagaatagatttcatgttccattcttctgcaatggttaattcacacagaaaaccaatgtttaacattcacagaggattttactgcttaacagccatcttgccccaaatatgcatttgttctcagttctcagtgccatctagttatcacttcactgaggatcctggggctttcccagtagccactaatggggaacgatttccttggcaggagctaaggctccccagtgtggtcattcctctccattatgacctctttgtccaccccaatctcacctctctggactttgttgcatctgagaagatcgaagtcttggtcagcaatgctacccagtttatcatcttgcacagcaaagatcttgaaatcacgaatgccacccttcagtcagaggaagattcaagatacatgaaaccaggaaaagaactgaaagttttgagttaccctgctcatgaacaaattgcactgctggttccagagaaacttacgcctcacctgaaatactatgtggctatggacttccaagccaagttaggtgatggctttgaagggttttataaaagcacatacagaactcttggtggtgaaacaagaattcttgcagtaacagattttgagccaacccaggcacgcatggctttcccttgctttgatgaaccgttgttcaaagccaacttttcaatcaagatacgaagagagagcaggcatattgcactatccaacatgccaaaggttaagacaattgaacttgaaggaggtcttttggaagatcactttgaaactactgtaaaaatgagtacataccttgtagcctacatagtttgtgatttccactctctgagtggcttcacttcatcaggggtcaaggtgtccatctatgcatccccagacaaacggaatcaaacacattatgctttgcaggcatcactgaagctacttgatttttatgaaaagtactttgatatctactatccactctccaaactggatttaattgctattcctgactttgcacctggagccatggaaaattggggcctcattacatatagggagacgtcactgctttttgaccccaagacctcttctgcttccgataaactgtgggtcaccagagtcatagcccatgaactggcgcaccagtggtttggcaacctggtcacaatggaatggtggaatgatatttggcttaaggagggttttgcaaaatacatggaacttatcgctgttaatgctacatatccagagctgcaatttgatgactattttttgaatgtgtgttttgaagtaattacaaaagattcattgaattcatcccgccctatctccaaaccagcggaaaccccgactcaaatacaggaaatgtttgatgaagtttcctataacaagggagcttgtattttgaatatgctcaaggattttctgggtgaggagaaattccagaaaggaataattcagtacttaaagaagttcagctatagaaatgctaagaatgatgacttgtggagcagtctgtcaaatagttgtttagaaagtgattttacatctggtggagtttgtcattcggatcccaagatgacaagtaacatgctcgcctttctgggggaaaatgcagaggtcaaagagatgatgactacatggactctccagaaaggaatccccctgctggtggttaaacaagacgggtgttcactccgactgcaacaggagcgcttcctccagggggttttccaggaagaccctgaatggagggccctgcaggagaggtacctgtggcatatcccattgacctactccacgagttcttctaatgtgatccacagacacattctaaaatcaaagacagatactctggatctacctgaaaagaccagttgggtgaaatttaatgtggactcaaatggttactacatcgttcactatgagggtcatggatgggaccaactcattacacagctgaatcagaaccacacacttctcagacctaaggacagagtaggtctgattcatgatgtgtttcagctagttggtgcagggagactgaccctagacaaagctcttgacatgacttactacctccaacatgaaacaagcagccccgcacttctcgaaggtctgagttacttggaatcgttttaccacatgatggacagaaggaatatttcagatatctctgaaaacctcaagcgttaccttcttcagtattttaagccagtgattgacaggcaaagctggagtgacaagggttcagtctgggacaggatgctccgctcggctctcttgaagctggcctgtgacctgaaccatgctccttgcatccagaaagctgctgaactcttctcccagtggatggaatccagtggaaaattaaatataccaacagatgttttaaagattgtgtattctgtgggtgctcagacaacagcaggatggaattaccttttagagcaatatgaactgtcaatgtcaagtgctgaacaaaacaaaattctgtatgctttgtcaacgagcaagcatcaggaaaagttactgaagttaattgaactaggaatggaaggaaaggttatcaagacacagaacttggcagctctccttcatgcgattgccagacgtccaaaggggcagcaactagcatgggattttgtaagagaaaattggacccatcttctgaaaaaatttgacttgggctcatatgacataaggatgatcatctctggcacaacagctcacttttcttccaaggataagttgcaagaggtgaaactattttttgaatctcttgaggctcaaggatcacatctggatatttttcaaactgttctggaaacgataaccaaaaatataaaatggctggagaagaatcttccgactctgaggacttggctaatggttaatacttaaatggtcaatagaaaaagtaggctgggcgcggtggctcacgcctgtaatcccagcactttgggaggctgagaagggcggatcacgaggtcaggagatggagaccatcctggctaacacggtgagaccccgtctccgctaaaaatacaaaaaattagccgggcatggtggcaggtgcctgtagtcccagctactcggcaggctgcagcaggaaaatggcataaacccgggaggtggagcttgcagtgagccgagattgcaccactgcattccagcctgggtgactgagcgagactctgtctcaaaaaaaaaaaaaaaaa

SEQ ID NO: 588 - DNA, 3967 bp, Homo sapiens
cccaactcaaacaggcagataaagagagatcaaagagatgagcatgagatacagtcccctcgtgcccaaggagacagggtggttacagacatggaaaatctgagaataatcacctctgataaagatcacagaagctgcccgggaggtgtttggtaagcttggagttacgtttgtggggtggatgggcagaagtcagatttcatagcactgaggatgcagcacaaggagaagttcaagatcaattcctaagacaacaacttggcactaaaaaacataaactatgttctgaaggctttaccctggggacaagggaagggaggtgataacagcagaagtggcagccactggcgatcctttctttccatggtttggcttctactccaaagccacttatttgtgcattctacaaaaagtttcttgtcctttttgaaataaagctcttatcctaagctccattcacacctgcgtgataatgaaccagctagtacttactgtactcaggaagcatgcaaagttctgaatcttagaacagaaagtgaaagcaaaagtaaattccccttcagtcaaatctgcagcagcatgatttaagattaaattcatgtattgaaaatattgttcagaccccatgtgacataactggagccagtgcagtgccatgaagaactacgagattagcctggatattaacttgtcttctagagaatagatttcatgttccattcttctgcaatggttaattcacacagaaaaccaatgtttaacattcacagaggattttactgcttaacagccatcttgccccaaatatgcatttgttctcagttctcagtgccatctagttatcacttcactgaggatcctggggctttcccagtagccactaatggggaacgatttccttggcaggagctaaggctccccagtgtggtcattcctctccattatgacctctttgtccaccccaatctcacctctctggactttgttgcatctgagaagatcgaagtcttggtcagcaatgctacccagtttatcatcttgcacagcaaagatcttgaaatcacgaatgccacccttcagtcagaggaagattcaagatacatgaaaccaggaaaagaactgaaagttttgagttaccctgctcatgaacaaattgcactgctggttccagagaaacttacgcctcacctgaaatactatgtggctatggacttccaagccaagttaggtgatggctttgaagggttttataaaagcacatacagaactcttggtggtgaaacaagaattcttgcagtaacagattttgagccaacccaggcacgcatggctttcccttgctttgatgaaccgttgttcaaagccaacttttcaatcaagatacgaagagagagcaggcatattgcactatccaacatgccaaaggttaagacaattgaacttgaaggaggtcttttggaagatcactttgaaactactgtaaaaatgagtacataccttgtagcctacatagtttgtgatttccactctctgagtggcttcacttcatcaggggtcaaggtgtccatctatgcatccccagacaaacggaatcaaacacattatgctttgcaggcatcactgaagctacttgatttttatgaaaagtactttgatatctactatccactctccaaactggatttaattgctattcctgactttgcacctggagccatggaaaattggggcctcattacatatagggagacgtcactgctttttgaccccaagacctcttctgcttccgataaactgtgggtcaccagagtcatagcccatgaactggcgcaccagtggtttggcaacctggtcacaatggaatggtggaatgatatttggcttaaggagggttttgcaaaatacatggaacttatcgctgttaatgctacatatccagagctgcaatttgatgactattttttgaatgtgtgttttgaagtaattacaaaagattcattgaattcatcccgccctatctccaaaccagcggaaaccccgactcaaatacaggaaatgtttgatgaagtttcctataacaagggagcttgtattttgaatatgctcaaggattttctgggtgaggagaaattccagaaaggaataattcagtacttaaagaagttcagctatagaaatgctaagaatgatgacttgtggagcagtctgtcaaatagttgtttagaaagtgattttacatctggtggagtttgtcattcggatcccaagatgacaagtaacatggtgaggataaagagagtcacagagtagaagagatctgtggaatagcctgacctagactcgcctttctgggggaaaatgcagaggtcaaagagatgatgactacatggactctccagaaaggaatccccctgctggtggttaaacaagacgggtgttcactccgactgcaacaggagcgcttcctccagggggttttccaggaagaccctgaatggagggccctgcaggagaggtacctgtggcatatcccattgacctactccacgagttcttctaatgtgatccacagacacattctaaaatcaaagacagatactctggatctacctgaaaagaccagttgggtgaaatttaatgtggactcaaatggttactacatcgttcactatgagggtcatggatgggaccaactcattacacagctgaatcagaaccacacacttctcagacctaaggacagagtaggtctgattcatgatgtgtttcagctagttggtgcagggagactgaccctagacaaagctcttgacatgacttactacctccaacatgaaacaagcagccccgcacttctcgaaggtctgagttacttggaatcgttttaccacatgatggacagaaggaatatttcagatatctctgaaaacctcaagcgttaccttcttcagtattttaagccagtgattgacaggcaaagctggagtgacaagggttcagtctgggacaggatgctccgctcggctctcttgaagctggcctgtgacctgaaccatgctccttgcatccagaaagctgctgaactcttctcccagtggatggaatccagtggaaaattaaatataccaacagatgttttaaagattgtgtattctgtgggtgctcagacaacagcaggatggaattaccttttagagcaatatgaactgtcaatgtcaagtgctgaacaaaacaaaattctgtatgctttgtcaacgagcaagcatcaggaaaagttactgaagttaattgaactaggaatggaaggaaaggttatcaagacacagaacttggcagctctccttcatgcgattgccagacgtccaaaggggcagcaactagcatgggattttgtaagagaaaattggacccatcttctgaaaaaatttgacttgggctcatatgacataaggatgatcatctctggcacaacagctcacttttcttccaaggataagttgcaagaggtgaaactattttttgaatctcttgaggctcaaggatcacatctggatatttttcaaactgttctggaaacgataaccaaaaatataaaatggctggagaagaatcttccgactctgaggacttggctaatggttaatacttaaatggtcaatagaaaaagtaggctgggcgcggtggctcacgcctgtaatcccagcactttgggaggctgagaagggcggatcacgaggtcaggagatggagaccatcctggctaacacggtgagaccccgtctccgctaaaaatacaaaaaattagccgggcatggtggcaggtgcctgtagtcccagctactcggcaggctgcagcaggaaaatggcataaacccgggaggtggagcttgcagtgagccgagattgcaccactgcattccagcctgggtgactgagcgagactctgtctcaaaaaaaaaaaaaaaaa

SEQ ID NO: 589 - DNA, 1863 bp, Homo sapiens
cccaactcaaacaggcagataaagagagatcaaagagatgagcatgagatacagtcccctcgtgcccaaggagacagggtggttacagacatggaaaatctgagaataatcacctctgataaagatcacagaagctgcccgggaggtgtttggtaagcttggagttacgtttgtggggtggatgggcagaagtcagatttcatagcactgaggatgcagcacaaggagaagttcaagatcaattcctaagacaacaacttggcactaaaaaacataaactatgttctgaaggctttaccctggggacaagggaagggaggtgataacagcagaagtggcagccactggcgatcctttctttccatggtttggcttctactccaaagccacttatttgtgcattctacaaaaagtttcttgtcctttttgaaataaagctcttatcctaagctccattcacacctgcgtgataatgaaccagctagtacttactgtactcaggaagcatgcaaagttctgaatcttagaacagaaagtgaaagcaaaagtaaattccccttcagtcaaatctgcagcagcatgatttaagattaaattcatgtattgaaaatattgttcagaccccatgtgacataactggagccagtgcagtgccatgaagaactacgagattagcctggatattaacttgtcttctagagaatagatttcatgttccattcttctgcaatggttaattcacacagaaaaccaatgtttaacattcacagaggattttactgcttaacagccatcttgccccaaatatgcatttgttctcagttctcagtgccatctagttatcacttcactgaggatcctggggctttcccagtagccactaatggggaacgatttccttggcaggagctaaggctccccagtgtggtcattcctctccattatgacctctttgtccaccccaatctcacctctctggactttgttgcatctgagaagatcgaagtcttggtcagcaatgctacccagtttatcatcttgcacagcaaagatcttgaaatcacgaatgccacccttcagtcagaggaagattcaagatacatgaaaccaggaaaagaactgaaagttttgagttaccctgctcatgaacaaattgcactgctggttccagagaaacttacgcctcacctgaaatactatgtggctatggacttccaagccaagttaggtgatggctttgaagggttttataaaagcacatacagaactcttggtggtgaaacaagaattcttgcagtaacagattttgagccaacccaggcacgcatggctttcccttgctttgatgaaccgttgttcaaagccaacttttcaatcaagatacgaagagagagcaggcatattgcactatccaacatgccaaaggttaagacaattgaacttgaaggaggtcttttggaagatcactttgaaactactgtaaaaatgagtacataccttgtagcctacatagtttgtgatttccactctctgagtggcttcacttcatcaggggtcaaggtgtccatctatgcatccccagacaaacggaatcaaacacattatgctttgcaggcatcactgaagctacttgatttttatgaaaagtactttgatatctactatccactctccaaactgggtatgttcaaattccacattattgtcttcatttttgctcataaaacttgctttgatctcttccctctttctctttctatgtgatttaaatgagcactgaggaattcagttagctcaggaaaaaataatttgttcctcagagatgattcttgagtgtagaaaataaaatatttatgacatgcc

SEQ ID NO: 590 - DNA, 1403 bp, Homo sapiens
cagctctgcgcggtgattcactccctccttcgccccggggcccccttcccggccagacggcgggcaagacagctgggtgtacagcgtcctcgaaaccacgagcaagtgagcagatcctccgaggcaccagggactccagcccatgccatggcggattctgagcgcctctcggctcctggctgctgggccgcctgcaccaacttctcgcgcactcgaaagggaatcctcctgtttgctgagattatattatgcctggtgatcctgatctgcttcagtgcctccacaccaggctactcctccctgtcggtgattgagatgatccttgctgctattttctttgttgtctacatgtgtgacctgcacaccaagataccattcatcaactggccctggagtgatttcttccgaaccctcatagcggcaatcctctacctgatcacctccattgttgtccttgttgagagaggaaaccactccaaaatcgtcgcaggggtactgggcctaatcgctacgtgcctctttggctatgatgcctatgtcaccttccccgttcggcagccaagacatacagcagcccccactgaccccgcagatggcccggtgtaggcgaacttccctcatttctctctgcaatctgcaaataactcctccattgaaataactcctccccaccccaacaacaacattcccagcagaccaactcccaccccctctttgaggtaaaagtgcctttattgggagacttttgtcttccagcctgccaatcaaccctcctgggtgtggccaccatatgtgtgtgcctaggtcctccttctgcacgatccaataggagacaccagttctgactgaaccatgcccccacctaagtcacaaaatgagggaagtggggagttagatttcagagtccaggccctaggttgggacccactccaaataatctcctcggtgtgggtggtggttctatagagggataaatgaataataaacattgttaaaatatacgataatgaataaagtaatcctttcatcaaatgtgggtaaatttcaagcatcaggagggggaaatggagtggaaacagctggggcaaggaggcaaagaagccaggcctgttttacaacaaatattaaattacttcaataatacaaacgagaggcccggtgcggtggctcatgcctgtaatcccagtcctttgggaggctgcgggaggattgcttgagcccaggagttctagaccagcctgggcaacatggcaaaaccccatctctaccaaaaaattaaaaaattagctgggaacgctgacacgagcctggagtcccagctacttgggaggctgaggtgggaggatagcttgagcccaaaacttttgaggctgcagtgagccctgatcacaccactgcactcc

SEQ ID NO: 591 - DNA, 971 bp, Homo sapiens
cagctctgcgcggtgattcactccctccttcgccccggggcccccttcccggccagacggcgggcaagacagctgggtgtacagcgtcctcgaaaccacgagcaagtgagcagatcctccgaggcaccagggactccagcccatgccatggcggattctgagcgcctctcggctcctggctgctgggccgcctgcaccaacttctcgcgcactcgaaagggaatcctcctgtttgctgagattatattatgcctggtgatcctgatctgcttcagtgcctccacaccaggctactcctccctgtcggtgattgagatgatccttgctgctattttctttgttgtctacatgtgtgacctgcacaccaagataccattcatcaactggccctggagtgatttcttccgaaccctcatagcggcaatcctctacctgatcacctccattgttgtccttgttgagagaggaaaccactccaaaatcgtcgcaggggtactgggcctaatcgctacgtgcctctttggctatgatgcctatgtcaccttccccgttcggcagccaagacatacagcagcccccactgaccccgcagatggcccggtgtaggcgaacttccctcatttctctctgcaatctgcaaataactcctccattgaaataactcctccccaccccaacaacaacattcccagcagaccaactcccaccccctctttgaggtaaaagtgcctttattgggagacttttgtcttccagcctgccaatcaaccctcctgggtgtggccaccatatgtgtgtgcctaggtcctccttctgcacgatccaataggagacaccagttctgactgaaccatgcccccacctaagtcacaaaatgagggaagtggggagttagatttcagagtccaggccctaggctgcgggaggattgcttgagcccaggagttctagaccagcctgggcaacatggc

SEQ ID NO: 592 - DNA, 5739 bp, Homo sapiens
gagaagaaagccagtgcgtctctgggcgcaggggccagtggggctcggaggcacaggcaccccgcgacactccaggttccccgacccacgtccctggcagccccgattatttacagcctcagcagagcacggggcgggggcagaggggcccgcccgggagggctgctacttcttaaaacctctgcgggctgcttagtcacagccccccttgcttgggtgtgtccttcgctcgctccctccctccgtcttaggtcactgttttcaacctcgaataaaaactgcagccaacttccgaggcagcctcattgcccagcggaccccagcctctgccaggttcggtccgccatcctcgtcccgtcctccgccggcccctgccccgcgcccagggatcctccagctcctttcgcccgcgccctccgttcgctccggacaccatggacaagttttggtggcacgcagcctggggactctgcctcgtgccgctgagcctggcgcagatcgatttgaatataacctgccgctttgcaggtgtattccacgtggagaaaaatggtcgctacagcatctctcggacggaggccgctgacctctgcaaggctttcaatagcaccttgcccacaatggcccagatggagaaagctctgagcatcggatttgagacctgcaggtatgggttcatagaagggcacgtggtgattccccggatccaccccaactccatctgtgcagcaaacaacacaggggtgtacatcctcacatccaacacctcccagtatgacacatattgcttcaatgcttcagctccacctgaagaagattgtacatcagtcacagacctgcccaatgcctttgatggaccaattaccataactattgttaaccgtgatggcacccgctatgtccagaaaggagaatacagaacgaatcctgaagacatctaccccagcaaccctactgatgatgacgtgagcagcggctcctccagtgaaaggagcagcacttcaggaggttacatcttttacaccttttctactgtacaccccatcccagacgaagacagtccctggatcaccgacagcacagacagaatccctgctaccactttgatgagcactagtgctacagcaactgagacagcaaccaagaggcaagaaacctgggattggttttcatggttgtttctaccatcagagtcaaagaatcatcttcacacaacaacacaaatggctggtacgtcttcaaataccatctcagcaggctgggagccaaatgaagaaaatgaagatgaaagagacagacacctcagtttttctggatcaggcattgatgatgatgaagattttatctccagcaccatttcaaccacaccacgggcttttgaccacacaaaacagaaccaggactggacccagtggaacccaagccattcaaatccggaagtgctacttcagacaaccacaaggatgactgatgtagacagaaatggcaccactgcttatgaaggaaactggaacccagaagcacaccctcccctcattcaccatgagcatcatgaggaagaagagaccccacattctacaagcacaatccaggcaactcctagtagtacaacggaagaaacagctacccagaaggaacagtggtttggcaacagatggcatgagggatatcgccaaacacccagagaagactcccattcgacaacagggacagctgcagcctcagctcataccagccatccaatgcaaggaaggacaacaccaagcccagaggacagttcctggactgatttcttcaacccaatctcacaccccatgggacgaggtcatcaagcaggaagaaggatggatatggactccagtcatagtataacgcttcagcctactgcaaatccaaacacaggtttggtggaagatttggacaggacaggacctctttcaatgacaacgcagcagagtaattctcagagcttctctacatcacatgaaggcttggaagaagataaagaccatccaacaacttctactctgacatcaagcaataggaatgatgtcacaggtggaagaagagacccaaatcattctgaaggctcaactactttactggaaggttatacctctcattacccacacacgaaggaaagcaggaccttcatcccagtgacctcagctaagactgggtcctttggagttactgcagttactgttggagattccaactctaatgtcaatcgttccttatcaggagaccaagacacattccaccccagtggggggtcccataccactcatggatctgaatcagatggacactcacatgggagtcaagaaggtggagcaaacacaacctctggtcctataaggacaccccaaattccagaatggctgatcatcttggcatccctcttggccttggctttgattcttgcagtttgcattgcagtcaacagtcgaagaaggtgtgggcagaagaaaaagctagtgatcaacagtggcaatggagctgtggaggacagaaagccaagtggactcaacggagaggccagcaagtctcaggaaatggtgcatttggtgaacaaggagtcgtcagaaactccagaccagtttatgacagctgatgagacaaggaacctgcagaatgtggacatgaagattggggtgtaacacctacaccattatcttggaaagaaacaaccgttggaaacataaccattacagggagctgggacacttaacagatgcaatgtgctactgattgtttcattgcgaatcttttttagcataaaattttctactctttttgttttttgtgttttgttctttaaagtcaggtccaatttgtaaaaacagcattgctttctgaaattagggcccaattaataatcagcaagaatttgatcgttccagttcccacttggaggcctttcatccctcgggtgtgctatggatggcttctaacaaaaactacacatatgtattcctgatcgccaacctttcccccaccagctaaggacatttcccagggttaatagggcctggtccctgggaggaaatttgaatgggtccattttgcccttccatagcctaatccctgggcattgctttccactgaggttgggggttggggtgtactagttacacatcttcaacagaccccctctagaaatttttcagatgcttctgggagacacccaaagggtgaagctatttatctgtagtaaactatttatctgtgtttttgaaatattaaaccctggatcagtcctttgatcagtataattttttaaagttactttgtcagaggcacaaaagggtttaaactgattcataataaatatctgtacttcttcgatcttcaccttttgtgctgtgattcttcagtttctaaaccagcactgtctgggtccctacaatgtatcaggaagagctgagaatggtaaggagactcttctaagtcttcatctcagagaccctgagttcccactcagacccactcagccaaatctcatggaagaccaaggagggcagcactgtttttgttttttgttttttgttttttttttttgacactgtccaaaggttttccatcctgtcctggaatcagagttggaagctgaggagcttcagcctcttttatggtttaatggccacctgttctctcctgtgaaaggctttgcaaagtcacattaagtttgcatgacctgttatccctggggccctatttcatagaggctggccctattagtgatttccaaaaacaatatggaagtgccttttgatgtcttacaataagagaagaagccaatggaaatgaaagagattggcaaaggggaaggatgatgccatgtagatcctgtttgacatttttatggctgtatttgtaaacttaaacacaccagtgtctgttcttgatgcagttgctatttaggatgagttaagtgcctggggagtccctcaaaaggttaaagggattcccatcattggaatcttatcaccagataggcaagtttatgaccaaacaagagagtactggctttatcctctaacctcatattttctcccacttggcaagtcctttgtggcatttattcatcagtcagggtgtccgattggtcctagaacttccaaaggctgcttgtcatagaagccattgcatctataaagcaacggctcctgttaaatggtatctcctttctgaggctcctactaaaagtcatttgttacctaaacttatgtgcttaacaggcaatgcttctcagaccacaaagcagaaagaagaagaaaagctcctgactaaatcagggctgggcttagacagagttgatctgtagaatatctttaaaggagagatgtcaactttctgcactattcccagcctctgctcctccctgtctaccctctcccctccctctctccctccacttcaccccacaatcttgaaaaacttcctttctcttctgtgaacatcattggccagatccattttcagtggtctggatttctttttattttcttttcaacttgaaagaaactggacattaggccactatgtgttgttactgccactagtgttcaagtgcctcttgttttcccagagatttcctgggtctgccagaggcccagacaggctcactcaagctctttaactgaaaagcaacaagccactccaggacaaggttcaaaatggttacaacagcctctacctgtcgccccagggagaaaggggtagtgatacaagtctcatagccagagatggttttccactccttctagatattcccaaaaagaggctgagacaggaggttattttcaattttattttggaattaaatacttttttccctttattactgttgtagtccctcacttggatatacctctgttttcacgatagaaataagggaggtctagagcttctattccttggccattgtcaacggagagctggccaagtcttcacaaacccttgcaacattgcctgaagtttatggaataagatgtattctcactcccttgatctcaagggcgtaactctggaagcacagcttgactacacgtcatttttaccaatgattttcaggtgacctgggctaagtcatttaaactgggtctttataaaagtaaaaggccaacatttaattattttgcaaagcaacctaagagctaaagatgtaatttttcttgcaattgtaaatcttttgtgtctcctgaagacttcccttaaaattagctctgagtgaaaaatcaaaagagacaaaagacatcttcgaatccatatttcaagcctggtagaattggcttttctagcagaacctttccaaaagttttatattgagattcataacaacaccaagaattgattttgtagccaacattcattcaatactgttatatcagaggagtaggagagaggaaacatttgacttatctggaaaagcaaaatgtacttaagaataagaataacatggtccattcacctttatgttatagatatgtctttgtgtaaatcatttgttttgagttttcaaagaatagcccattgttcattcttgtgctgtacaatgaccactgttattgttactttgacttttcagagcacacccttcctctggtttttgtatatttattgatggatcaataataatgaggaaagcatgatatgtatattgctgagttgaaagcacttattggaaaatattaaaaggctaacattaaaagactaaaggaaacagactcagaa

SEQ ID NO: 593 - DNA, 5674 bp, Homo sapiens
gagaagaaagccagtgcgtctctgggcgcaggggccagtggggctcggaggcacaggcaccccgcgacactccaggttccccgacccacgtccctggcagccccgattatttacagcctcagcagagcacggggcgggggcagaggggcccgcccgggagggctgctacttcttaaaacctctgcgggctgcttagtcacagccccccttgcttgggtgtgtccttcgctcgctccctccctccgtcttaggtcactgttttcaacctcgaataaaaactgcagccaacttccgaggcagcctcattgcccagcggaccccagcctctgccaggttcggtccgccatcctcgtcccgtcctccgccggcccctgccccgcgcccagggatcctccagctcctttcgcccgcgccctccgttcgctccggacaccatggacaagttttggtggcacgcagcctggggactctgcctcgtgccgctgagcctggcgcagatcgatttgaatataacctgccgctttgcaggtgtattccacgtggagaaaaatggtcgctacagcatctctcggacggaggccgctgacctctgcaaggctttcaatagcaccttgcccacaatggcccagatggagaaagctctgagcatcggatttgagacctgcaggtatgggttcatagaagggcacgtggtgattccccggatccaccccaactccatctgtgcagcaaacaacacaggggtgtacatcctcacatccaacacctcccagtatgacacatattgcttcaatgcttcagctccacctgaagaagattgtacatcagtcacagacctgcccaatgcctttgatggaccaattaccataactattgttaaccgtgatggcacccgctatgtccagaaaggagaatacagaacgaatcctgaagacatctaccccagcaaccctactgatgatgacgtgagcagcggctcctccagtgaaaggagcagcacttcaggaggttacatcttttacaccttttctactgtacaccccatcccagacgaagacagtccctggatcaccgacagcacagacagaatccctgctaccactttgatgagcactagtgctacagcaactgagacagcaaccaagaggcaagaaacctgggattggttttcatggttgtttctaccatcagagtcaaagaatcatcttcacacaacaacacaaatggctggtacgtcttcaaataccatctcagcaggctgggagccaaatgaagaaaatgaagatgaaagagacagacacctcagtttttctggatcaggcattgatgatgatgaagattttatctccagcaccatttcaaccacaccacgggcttttgaccacacaaaacagaaccaggactggacccagtggaacccaagccattcaaatccggaagtgctacttcagacaaccacaaggatgactgatgtagacagaaatggcaccactgcttatgaaggaaactggaacccagaagcacaccctcccctcattcaccatgagcatcatgaggaagaagagaccccacattctacaagcacaatccaggcaactcctagtagtacaacggaagaaacagctacccagaaggaacagtggtttggcaacagatggcatgagggatatcgccaaacacccagagaagactcccattcgacaacagggacagctgcagcctcagctcataccagccatccaatgcaaggaaggacaacaccaagcccagaggacagttcctggactgatttcttcaacccaatctcacaccccatgggacgaggtcatcaagcaggaagaaggatggatatggactccagtcatagtataacgcttcagcctactgcaaatccaaacacaggtttggtggaagatttggacaggacaggacctctttcaatgacaacgcagcagagtaattctcagagcttctctacatcacatgaaggcttggaagaagataaagaccatccaacaacttctactctgacatcaagcaataggaatgatgtcacaggtggaagaagagacccaaatcattctgaaggctcaactactttactggaaggttatacctctcattacccacacacgaaggaaagcaggaccttcatcccagtgacctcagctaagactgggtcctttggagttactgcagttactgttggagattccaactctaatgtcaatcgttccttatcaggagaccaagacacattccaccccagtggggggtcccataccactcatggatctgaatcagatggacactcacatgggagtcaagaaggtggagcaaacacaacctctggtcctataaggacaccccaaattccagaatggctgatcatcttggcatccctcttggccttggctttgattcttgcagtttgcattgcagtcaacagtcgaagaaggtgtgggcagaagaaaaagctagtgatcaacagtggcaatggagctgtggaggacagaaagccaagtggactcaacggagaggccagcaagtctcaggaaatggtgcatttggtgaacaaggagtcgtcagaaactccagaccagtttatgacagctgatgagacaaggaacctgcagaatgtggacatgaagattggggtgtaacacctacaccattatcttggaaagaaacaaccgttggaaacataaccattacagggagctgggacacttaacagatgcaatgtgctactgattgtttcattgcgaatcttttttagcataaaattttctactctttttgttttttgtgttttgttctttaaagtcaggtccaatttgtaaaaacagcattgctttctgaaattagggcccaattaataatcagcaagaatttgatcgttccagttcccacttggaggcctttcatccctcgggtgtgctatggatggcttctaacaaaaactacacatatgtattcctgatcgccaacctttcccccaccagctaaggacatttcccagggttaatagggcctggtccctgggaggaaatttgaatgggtccattttgcccttccatagcctaatccctgggcattgctttccactgaggttgggggttggggtgtactagttacacatcttcaacagaccccctctagaaatttttcagatgcttctgggagacacccaaagggtgaagctatttatctgtagtaaactatttatctgtgtttttgaaatattaaaccctggatcagtcctttgatcagtataattttttaaagttactttgtcagaggcacaaaagggtttaaactgattcataataaatatctgtacttcttcgatcttcaccttttgtgctgtgattcttcagtttctaaaccagcactgtctgggtccctacaatgtatcaggaagagctgagaatggtaaggagactcttctaagtcttcatctcagagaccctgagttcccactcagacccactcagccaaatctcatggaagaccaaggagggcagcactgtttttgttttttgttttttacactgtccaaaggttttccatcctgtcctggaatcagagttggaagctgaggagcttcagcctcttttatggtttaatggccacctgttctctcctgtgaaaggctttgcaaagtcacattaagtttgcatgacctgttatccctggggccctatttcatagaggctggccctattagtgatttccaaaaacaatatggaagtgccttttgatgtcttacaataagagaagaagccaatggaaatgaaagagattggcaaaggggaaggatgatgccatgtagatcctgtttgacatttttatggctgtatttgtaaacttaaacacaccagtgtctgttcttgatgcagttgctatttaggatgagttaagtgcctggggagtccctcaaaaggttaaagggattcccatcattggaatcttatcaccagataggcaagtttatgaccaaacaagagagtactggctttatcctctaacctcatattttctcccacttggcaagtcctttgtggcatttattcatcagtcagggtgtccgattggtcctagaacttccaaaggctgcttgtcatagaagccattgcatctataaagcaacggctcctgttaaatggtatctcctttctgaggctcctactaaaagtcatttgttacctaaacttatgtgcttaacaggcaatgcttctcagaccacaaagcagaaagaagaagaaaagctcctgactaaatcagggctgggcttagacagagttgatctgtagaatatctttaaaggagagatgtcaactttctgcactattcccagcctctgctcctccctgtctaccctctcccctccctctctccctccacttcaccccacaatctttggtctggatttctttttattttcttttcaacttgaaagaaactggacattaggccactatgtgttgttactgccactagtgttcaagtgcctcttgttttcccagagatttcctgggtctgccagaggcccagacaggctcactcaagctctttaactgaaaagcaacaagccactccaggacaaggttcaaaatggttacaacagcctctacctgtcgccccagggagaaaggggtagtgatacaagtctcatagccagagatggttttccactccttctagatattcccaaaaagaggctgagacaggaggttattttcaattttattttggaattaaatacttttttccctttattactgttgtagtccctcacttggatatacctctgttttcacgatagaaataagggaggtctagagcttctattccttggccattgtcaacggagagctggccaagtcttcacaaacccttgcaacattgcctgaagtttatggaataagatgtattctcactcccttgatctcaagggcgtaactctggaagcacagcttgactacacgtcatttttaccaatgattttcaggtgacctgggctaagtcatttaaactgggtctttataaaagtaaaaggccaacatttaattattttgcaaagcaacctaagagctaaagatgtaatttttcttgcaattgtaaatcttttgtgtctcctgaagacttcccttaaaattagctctgagtgaaaaatcaaaagagacaaaagacatcttcgaatccatatttcaagcctggtagaattggcttttctagcagaacctttccaaaagttttatattgagattcataacaacaccaagaattgattttgtagccaacattcattcaatactgttatatcagaggagtaggagagaggaaacatttgacttatctggaaaagcaaaatgtacttaagaataagaataacatggtccattcacctttatgttatagatatgtctttgtgtaaatcatttgttttgagttttcaaagaatagcccattgttcattcttgtgctgtacaatgaccactgttattgttactttgacttttcagagcacacccttcctctggtttttgtatatttattgatggatcaataataatgaggaaagcatgatatgtatattgctgagttgaaagcacttattggaaaatattaaaaggctaacattaaaagactaaaggaaacagactcagaa

SEQ ID NO: 594 - DNA, 4633 bp, Homo sapiens
gagaagaaagccagtgcgtctctgggcgcaggggccagtggggctcggaggcacaggcaccccgcgacactccaggttccccgacccacgtccctggcagccccgattatttacagcctcagcagagcacggggcgggggcagaggggcccgcccgggagggctgctacttcttaaaacctctgcgggctgcttagtcacagccccccttgcttgggtgtgtccttcgctcgctccctccctccgtcttaggtcactgttttcaacctcgaataaaaactgcagccaacttccgaggcagcctcattgcccagcggaccccagcctctgccaggttcggtccgccatcctcgtcccgtcctccgccggcccctgccccgcgcccagggatcctccagctcctttcgcccgcgccctccgttcgctccggacaccatggacaagttttggtggcacgcagcctggggactctgcctcgtgccgctgagcctggcgcagatcgatttgaatataacctgccgctttgcaggtgtattccacgtggagaaaaatggtcgctacagcatctctcggacggaggccgctgacctctgcaaggctttcaatagcaccttgcccacaatggcccagatggagaaagctctgagcatcggatttgagacctgcaggtatgggttcatagaagggcacgtggtgattccccggatccaccccaactccatctgtgcagcaaacaacacaggggtgtacatcctcacatccaacacctcccagtatgacacatattgcttcaatgcttcagctccacctgaagaagattgtacatcagtcacagacctgcccaatgcctttgatggaccaattaccataactattgttaaccgtgatggcacccgctatgtccagaaaggagaatacagaacgaatcctgaagacatctaccccagcaaccctactgatgatgacgtgagcagcggctcctccagtgaaaggagcagcacttcaggaggttacatcttttacaccttttctactgtacaccccatcccagacgaagacagtccctggatcaccgacagcacagacagaatccctgctaccaatatggactccagtcatagtataacgcttcagcctactgcaaatccaaacacaggtttggtggaagatttggacaggacaggacctctttcaatgacaacgcgagaccaagacacattccaccccagtggggggtcccataccactcatggatctgaatcagatggacactcacatgggagtcaagaaggtggagcaaacacaacctctggtcctataaggacaccccaaattccagaatggctgatcatcttggcatccctcttggccttggctttgattcttgcagtttgcattgcagtcaacagtcgaagaaggtgtgggcagaagaaaaagctagtgatcaacagtggcaatggagctgtggaggacagaaagccaagtggactcaacggagaggccagcaagtctcaggaaatggtgcatttggtgaacaaggagtcgtcagaaactccagaccagtttatgacagctgatgagacaaggaacctgcagaatgtggacatgaagattggggtgtaacacctacaccattatcttggaaagaaacaaccgttggaaacataaccattacagggagctgggacacttaacagatgcaatgtgctactgattgtttcattgcgaatcttttttagcataaaattttctactctttttgttttttgtgttttgttctttaaagtcaggtccaatttgtaaaaacagcattgctttctgaaattagggcccaattaataatcagcaagaatttgatcgttccagttcccacttggaggcctttcatccctcgggtgtgctatggatggcttctaacaaaaactacacatatgtattcctgatcgccaacctttcccccaccagctaaggacatttcccagggttaatagggcctggtccctgggaggaaatttgaatgggtccattttgcccttccatagcctaatccctgggcattgctttccactgaggttgggggttggggtgtactagttacacatcttcaacagaccccctctagaaatttttcagatgcttctgggagacacccaaagggtgaagctatttatctgtagtaaactatttatctgtgtttttgaaatattaaaccctggatcagtcctttgatcagtataattttttaaagttactttgtcagaggcacaaaagggtttaaactgattcataataaatatctgtacttcttcgatcttcaccttttgtgctgtgattcttcagtttctaaaccagcactgtctgggtccctacaatgtatcaggaagagctgagaatggtaaggagactcttctaagtcttcatctcagagaccctgagttcccactcagacccactcagccaaatctcatggaagaccaaggagggcagcactgtttttgttttttgttttttacactgtccaaaggttttccatcctgtcctggaatcagagttggaagctgaggagcttcagcctcttttatggtttaatggccacctgttctctcctgtgaaaggctttgcaaagtcacattaagtttgcatgacctgttatccctggggccctatttcatagaggctggccctattagtgatttccaaaaacaatatggaagtgccttttgatgtcttacaataagagaagaagccaatggaaatgaaagagattggcaaaggggaaggatgatgccatgtagatcctgtttgacatttttatggctgtatttgtaaacttaaacacaccagtgtctgttcttgatgcagttgctatttaggatgagttaagtgcctggggagtccctcaaaaggttaaagggattcccatcattggaatcttatcaccagataggcaagtttatgaccaaacaagagagtactggctttatcctctaacctcatattttctcccacttggcaagtcctttgtggcatttattcatcagtcagggtgtccgattggtcctagaacttccaaaggctgcttgtcatagaagccattgcatctataaagcaacggctcctgttaaatggtatctcctttctgaggctcctactaaaagtcatttgttacctaaacttatgtgcttaacaggcaatgcttctcagaccacaaagcagaaagaagaagaaaagctcctgactaaatcagggctgggcttagacagagttgatctgtagaatatctttaaaggagagatgtcaactttctgcactattcccagcctctgctcctccctgtctaccctctcccctccctctctccctccacttcaccccacaatctttggtctggatttctttttattttcttttcaacttgaaagaaactggacattaggccactatgtgttgttactgccactagtgttcaagtgcctcttgttttcccagagatttcctgggtctgccagaggcccagacaggctcactcaagctctttaactgaaaagcaacaagccactccaggacaaggttcaaaatggttacaacagcctctacctgtcgccccagggagaaaggggtagtgatacaagtctcatagccagagatggttttccactccttctagatattcccaaaaagaggctgagacaggaggttattttcaattttattttggaattaaatacttttttccctttattactgttgtagtccctcacttggatatacctctgttttcacgatagaaataagggaggtctagagcttctattccttggccattgtcaacggagagctggccaagtcttcacaaacccttgcaacattgcctgaagtttatggaataagatgtattctcactcccttgatctcaagggcgtaactctggaagcacagcttgactacacgtcatttttaccaatgattttcaggtgacctgggctaagtcatttaaactgggtctttataaaagtaaaaggccaacatttaattattttgcaaagcaacctaagagctaaagatgtaatttttcttgcaattgtaaatcttttgtgtctcctgaagacttcccttaaaattagctctgagtgaaaaatcaaaagagacaaaagacatcttcgaatccatatttcaagcctggtagaattggcttttctagcagaacctttccaaaagttttatattgagattcataacaacaccaagaattgattttgtagccaacattcattcaatactgttatatcagaggagtaggagagaggaaacatttgacttatctggaaaagcaaaatgtacttaagaataagaataacatggtccattcacctttatgttatagatatgtctttgtgtaaatcatttgttttgagttttcaaagaatagcccattgttcattcttgtgctgtacaatgaccactgttattgttactttgacttttcagagcacacccttcctctggtttttgtatatttattgatggatcaataataatgaggaaagcatgatatgtatattgctgagttgaaagcacttattggaaaatattaaaaggctaacattaaaagactaaaggaaacagactcagaa

SEQ ID NO: 595 - DNA, 4874 bp, Homo sapiens
gagaagaaagccagtgcgtctctgggcgcaggggccagtggggctcggaggcacaggcaccccgcgacactccaggttccccgacccacgtccctggcagccccgattatttacagcctcagcagagcacggggcgggggcagaggggcccgcccgggagggctgctacttcttaaaacctctgcgggctgcttagtcacagccccccttgcttgggtgtgtccttcgctcgctccctccctccgtcttaggtcactgttttcaacctcgaataaaaactgcagccaacttccgaggcagcctcattgcccagcggaccccagcctctgccaggttcggtccgccatcctcgtcccgtcctccgccggcccctgccccgcgcccagggatcctccagctcctttcgcccgcgccctccgttcgctccggacaccatggacaagttttggtggcacgcagcctggggactctgcctcgtgccgctgagcctggcgcagatcgatttgaatataacctgccgctttgcaggtgtattccacgtggagaaaaatggtcgctacagcatctctcggacggaggccgctgacctctgcaaggctttcaatagcaccttgcccacaatggcccagatggagaaagctctgagcatcggatttgagacctgcaggtatgggttcatagaagggcacgtggtgattccccggatccaccccaactccatctgtgcagcaaacaacacaggggtgtacatcctcacatccaacacctcccagtatgacacatattgcttcaatgcttcagctccacctgaagaagattgtacatcagtcacagacctgcccaatgcctttgatggaccaattaccataactattgttaaccgtgatggcacccgctatgtccagaaaggagaatacagaacgaatcctgaagacatctaccccagcaaccctactgatgatgacgtgagcagcggctcctccagtgaaaggagcagcacttcaggaggttacatcttttacaccttttctactgtacaccccatcccagacgaagacagtccctggatcaccgacagcacagacagaatccctgctaccaatatggactccagtcatagtataacgcttcagcctactgcaaatccaaacacaggtttggtggaagatttggacaggacaggacctctttcaatgacaacgcagcagagtaattctcagagcttctctacatcacatgaaggcttggaagaagataaagaccatccaacaacttctactctgacatcaagcaataggaatgatgtcacaggtggaagaagagacccaaatcattctgaaggctcaactactttactggaaggttatacctctcattacccacacacgaaggaaagcaggaccttcatcccagtgacctcagctaagactgggtcctttggagttactgcagttactgttggagattccaactctaatgtcaatcgttccttatcaggagaccaagacacattccaccccagtggggggtcccataccactcatggatctgaatcagatggacactcacatgggagtcaagaaggtggagcaaacacaacctctggtcctataaggacaccccaaattccagaatggctgatcatcttggcatccctcttggccttggctttgattcttgcagtttgcattgcagtcaacagtcgaagaaggtgtgggcagaagaaaaagctagtgatcaacagtggcaatggagctgtggaggacagaaagccaagtggactcaacggagaggccagcaagtctcaggaaatggtgcatttggtgaacaaggagtcgtcagaaactccagaccagtttatgacagctgatgagacaaggaacctgcagaatgtggacatgaagattggggtgtaacacctacaccattatcttggaaagaaacaaccgttggaaacataaccattacagggagctgggacacttaacagatgcaatgtgctactgattgtttcattgcgaatcttttttagcataaaattttctactctttttgttttttgtgttttgttctttaaagtcaggtccaatttgtaaaaacagcattgctttctgaaattagggcccaattaataatcagcaagaatttgatcgttccagttcccacttggaggcctttcatccctcgggtgtgctatggatggcttctaagacatttcccagggttaatagggcctggtccctgggaggaaatttgaatgggtccattttgcccttccatagcctaatccctgggcattgctttccactgaggttgggggttggggtgtactagttacacatcttcaacagaccccctctagaaatttttcagatgcttctgggagacacccaaagggtgaagctatttatctgtagtaaactatttatctgtgtttttgaaatattaaaccctggatcagtcctttgatcagtataattttttaaagttactttgtcagaggcacaaaagggtttaaactgattcataataaatatctgtacttcttcgatcttcaccttttgtgctgtgattcttcagtttctaaaccagcactgtctgggtccctacaatgtatcaggaagagctgagaatggtaaggagactcttctaagtcttcatctcagagaccctgagttcccactcagacccactcagccaaatctcatggaagaccaaggagggcagcactgtttttgttttttgttttttacactgtccaaaggttttccatcctgtcctggaatcagagttggaagctgaggagcttcagcctcttttatggtttaatggccacctgttctctcctgtgaaaggctttgcaaagtcacattaagtttgcatgacctgttatccctggggccctatttcatagaggctggccctattagtgatttccaaaaacaatatggaagtgccttttgatgtcttacaataagagaagaagccaatggaaatgaaagagattggcaaaggggaaggatgatgccatgtagatcctgtttgacatttttatggctgtatttgtaaacttaaacacaccagtgtctgttcttgatgcagttgctatttaggatgagttaagtgcctggggagtccctcaaaaggttaaagggattcccatcattggaatcttatcaccagataggcaagtttatgaccaaacaagagagtactggctttatcctctaacctcatattttctcccacttggcaagtcctttgtggcatttattcatcagtcagggtgtccgattggtcctagaacttccaaaggctgcttgtcatagaagccattgcatctataaagcaacggctcctgttaaatggtatctcctttctgaggctcctactaaaagtcatttgttacctaaacttatgtgcttaacaggcaatgcttctcagaccacaaagcagaaagaagaagaaaagctcctgactaaatcagggctgggcttagacagagttgatctgtagaatatctttaaaggagagatgtcaactttctgcactattcccagcctctgctcctccctgtctaccctctcccctccctctctccctccacttcaccccacaatctttggtctggatttctttttattttcttttcaacttgaaagaaactggacattaggccactatgtgttgttactgccactagtgttcaagtgcctcttgttttcccagagatttcctgggtctgccagaggcccagacaggctcactcaagctctttaactgaaaagcaacaagccactccaggacaaggttcaaaatggttacaacagcctctacctgtcgccccagggagaaaggggtagtgatacaagtctcatagccagagatggttttccactccttctagatattcccaaaaagaggctgagacaggaggttattttcaattttattttggaattaaatacttttttccctttattactgttgtagtccctcacttggatatacctctgttttcacgatagaaataagggaggtctagagcttctattccttggccattgtcaacggagagctggccaagtcttcacaaacccttgcaacattgcctgaagtttatggaataagatgtattctcactcccttgatctcaagggcgtaactctggaagcacagcttgactacacgtcatttttaccaatgattttcaggtgacctgggctaagtcatttaaactgggtctttataaaagtaaaaggccaacatttaattattttgcaaagcaacctaagagctaaagatgtaatttttcttgcaattgtaaatcttttgtgtctcctgaagacttcccttaaaattagctctgagtgaaaaatcaaaagagacaaaagacatcttcgaatccatatttcaagcctggtagaattggcttttctagcagaacctttccaaaagttttatattgagattcataacaacaccaagaattgattttgtagccaacattcattcaatactgttatatcagaggagtaggagagaggaaacatttgacttatctggaaaagcaaaatgtacttaagaataagaataacatggtccattcacctttatgttatagatatgtctttgtgtaaatcatttgttttgagttttcaaagaatagcccattgttcattcttgtgctgtacaatgaccactgttattgttactttgacttttcagagcacacccttcctctggtttttgtatatttattgatggatcaataataatgaggaaagcatgatatgtatattgctgagttgaaagcacttattggaaaatattaaaaggctaacattaaaagactaaaggaaacagactcagaa

SEQ ID NO: 596 - DNA, 4335 bp, Homo sapiens
gagaagaaagccagtgcgtctctgggcgcaggggccagtggggctcggaggcacaggcaccccgcgacactccaggttccccgacccacgtccctggcagccccgattatttacagcctcagcagagcacggggcgggggcagaggggcccgcccgggagggctgctacttcttaaaacctctgcgggctgcttagtcacagccccccttgcttgggtgtgtccttcgctcgctccctccctccgtcttaggtcactgttttcaacctcgaataaaaactgcagccaacttccgaggcagcctcattgcccagcggaccccagcctctgccaggttcggtccgccatcctcgtcccgtcctccgccggcccctgccccgcgcccagggatcctccagctcctttcgcccgcgccctccgttcgctccggacaccatggacaagttttggtggcacgcagcctggggactctgcctcgtgccgctgagcctggcgcagatcgatttgaatataacctgccgctttgcaggtgtattccacgtggagaaaaatggtcgctacagcatctctcggacggaggccgctgacctctgcaaggctttcaatagcaccttgcccacaatggcccagatggagaaagctctgagcatcggatttgagacctgcaggtatgggttcatagaagggcacgtggtgattccccggatccaccccaactccatctgtgcagcaaacaacacaggggtgtacatcctcacatccaacacctcccagtatgacacatattgcttcaatgcttcagctccacctgaagaagattgtacatcagtcacagacctgcccaatgcctttgatggaccaattaccataactattgttaaccgtgatggcacccgctatgtccagaaaggagaatacagaacgaatcctgaagacatctaccccagcaaccctactgatgatgacgtgagcagcggctcctccagtgaaaggagcagcacttcaggaggttacatcttttacaccttttctactgtacaccccatcccagacgaagacagtccctggatcaccgacagcacagacagaatccctgctaccagagaccaagacacattccaccccagtggggggtcccataccactcatggatctgaatcagatggacactcacatgggagtcaagaaggtggagcaaacacaacctctggtcctataaggacaccccaaattccagaatggctgatcatcttggcatccctcttggccttggctttgattcttgcagtttgcattgcagtcaacagtcgaagaaggtgtgggcagaagaaaaagctagtgatcaacagtggcaatggagctgtggaggacagaaagccaagtggactcaacggagaggccagcaagtctcaggaaatggtgcatttggtgaacaaggagtcgtcagaaactccagaccagtttatgacagctgatgagacaaggaacctgcagaatgtggacatgaagattggggtgtaacacctacaccattatcttggaaagaaacaaccgttggaaacataaccattacagggagctgggacacttaacagatgcaatgtgctactgattgtttcattgcgaatcttttttagcataaaattttctactctttcccccaccagctaaggacatttcccagggttaatagggcctggtccctgggaggaaatttgaatgggtccattttgcccttccatagcctaatccctgggcattgctttccactgaggttgggggttggggtgtactagttacacatcttcaacagaccccctctagaaatttttcagatgcttctgggagacacccaaagggtgaagctatttatctgtagtaaactatttatctgtgtttttgaaatattaaaccctggatcagtcctttgatcagtataattttttaaagttactttgtcagaggcacaaaagggtttaaactgattcataataaatatctgtacttcttcgatcttcaccttttgtgctgtgattcttcagtttctaaaccagcactgtctgggtccctacaatgtatcaggaagagctgagaatggtaaggagactcttctaagtcttcatctcagagaccctgagttcccactcagacccactcagccaaatctcatggaagaccaaggagggcagcactgtttttgttttttgttttttacactgtccaaaggttttccatcctgtcctggaatcagagttggaagctgaggagcttcagcctcttttatggtttaatggccacctgttctctcctgtgaaaggctttgcaaagtcacattaagtttgcatgacctgttatccctggggccctatttcatagaggctggccctattagtgatttccaaaaacaatatggaagtgccttttgatgtcttacaataagagaagaagccaatggaaatgaaagagattggcaaaggggaaggatgatgccatgtagatcctgtttgacatttttatggctgtatttgtaaacttaaacacaccagtgtctgttcttgatgcagttgctatttaggatgagttaagtgcctggggagtccctcaaaaggttaaagggattcccatcattggaatcttatcaccagataggcaagtttatgaccaaacaagagagtactggctttatcctctaacctcatattttctcccacttggcaagtcctttgtggcatttattcatcagtcagggtgtccgattggtcctagaacttccaaaggctgcttgtcatagaagccattgcatctataaagcaacggctcctgttaaatggtatctcctttctgaggctcctactaaaagtcatttgttacctaaacttatgtgcttaacaggcaatgcttctcagaccacaaagcagaaagaagaagaaaagctcctgactaaatcagggctgggcttagacagagttgatctgtagaatatctttaaaggagagatgtcaactttctgcactattcccagcctctgctcctccctgtctaccctctcccctccctctctccctccacttcaccccacaatctttggtctggatttctttttattttcttttcaacttgaaagaaactggacattaggccactatgtgttgttactgccactagtgttcaagtgcctcttgttttcccagagatttcctgggtctgccagaggcccagacaggctcactcaagctctttaactgaaaagcaacaagccactccaggacaaggttcaaaatggttacaacagcctctacctgtcgccccagggagaaaggggtagtgatacaagtctcatagccagagatggttttccactccttctagatattcccaaaaagaggctgagacaggaggttattttcaattttattttggaattaaatacttttttccctttattactgttgtagtccctcacttggatatacctctgttttcacgatagaaataagggaggtctagagcttctattccttggccattgtcaacggagagctggccaagtcttcacaaacccttgcaacattgcctgaagtttatggaataagatgtattctcactcccttgatctcaagggcgtaactctggaagcacagcttgactacacgtcatttttaccaatgattttcaggtgacctgggctaagtcatttaaactgggtctttataaaagtaaaaggccaacatttaattattttgcaaagcaacctaagagctaaagatgtaatttttcttgcaattgtaaatcttttgtgtctcctgaagacttcccttaaaattagctctgagtgaaaaatcaaaagagacaaaagacatcttcgaatccatatttcaagcctggtagaattggcttttctagcagaacctttccaaaagttttatattgagattcataacaacaccaagaattgattttgtagccaacattcattcaatactgttatatcagaggagtaggagagaggaaacatttgacttatctggaaaagcaaaatgtacttaagaataagaataacatggtccattcacctttatgttatagatatgtctttgtgtaaatcatttgttttgagttttcaaagaatagcccattgttcattcttgtgctgtacaatgaccactgttattgttactttgacttttcagagcacacccttcctctggtttttgtatatttattgatggatcaataataatgaggaaagcatgatatgtatattgctgagttgaaagcacttattggaaaatattaaaaggctaacattaaaagactaaaggaaacagactcagaa

SEQ ID NO: 597 - DNA, 5053 bp, Homo sapiens
gagaagaaagccagtgcgtctctgggcgcaggggccagtggggctcggaggcacaggcaccccgcgacactccaggttccccgacccacgtccctggcagccccgattatttacagcctcagcagagcacggggcgggggcagaggggcccgcccgggagggctgctacttcttaaaacctctgcgggctgcttagtcacagccccccttgcttgggtgtgtccttcgctcgctccctccctccgtcttaggtcactgttttcaacctcgaataaaaactgcagccaacttccgaggcagcctcattgcccagcggaccccagcctctgccaggttcggtccgccatcctcgtcccgtcctccgccggcccctgccccgcgcccagggatcctccagctcctttcgcccgcgccctccgttcgctccggacaccatggacaagttttggtggcacgcagcctggggactctgcctcgtgccgctgagcctggcgcagatcgatttgaatataacctgccgctttgcaggtgtattccacgtggagaaaaatggtcgctacagcatctctcggacggaggccgctgacctctgcaaggctttcaatagcaccttgcccacaatggcccagatggagaaagctctgagcatcggatttgagacctgcaggtatgggttcatagaagggcacgtggtgattccccggatccaccccaactccatctgtgcagcaaacaacacaggggtgtacatcctcacatccaacacctcccagtatgacacatattgcttcaatgcttcagctccacctgaagaagattgtacatcagtcacagacctgcccaatgcctttgatggaccaattaccataactattgttaaccgtgatggcacccgctatgtccagaaaggagaatacagaacgaatcctgaagacatctaccccagcaaccctactgatgatgacgtgagcagcggctcctccagtgaaaggagcagcacttcaggaggttacatcttttacaccttttctactgtacaccccatcccagacgaagacagtccctggatcaccgacagcacagacagaatccctgctaccagtacgtcttcaaataccatctcagcaggctgggagccaaatgaagaaaatgaagatgaaagagacagacacctcagtttttctggatcaggcattgatgatgatgaagattttatctccagcaccaatatggactccagtcatagtataacgcttcagcctactgcaaatccaaacacaggtttggtggaagatttggacaggacaggacctctttcaatgacaacgcagcagagtaattctcagagcttctctacatcacatgaaggcttggaagaagataaagaccatccaacaacttctactctgacatcaagcaataggaatgatgtcacaggtggaagaagagacccaaatcattctgaaggctcaactactttactggaaggttatacctctcattacccacacacgaaggaaagcaggaccttcatcccagtgacctcagctaagactgggtcctttggagttactgcagttactgttggagattccaactctaatgtcaatcgttccttatcaggagaccaagacacattccaccccagtggggggtcccataccactcatggatctgaatcagatggacactcacatgggagtcaagaaggtggagcaaacacaacctctggtcctataaggacaccccaaattccagaatggctgatcatcttggcatccctcttggccttggctttgattcttgcagtttgcattgcagtcaacagtcgaagaaggtgtgggcagaagaaaaagctagtgatcaacagtggcaatggagctgtggaggacagaaagccaagtggactcaacggagaggccagcaagtctcaggaaatggtgcatttggtgaacaaggagtcgtcagaaactccagaccagtttatgacagctgatgagacaaggaacctgcagaatgtggacatgaagattggggtgtaacacctacaccattatcttggaaagaaacaaccgttggaaacataaccattacagggagctgggacacttaacagatgcaatgtgctactgattgtttcattgcgaatcttttttagcataaaattttctactctttttgttttttgtgttttgttctttaaagtcaggtccaatttgtaaaaacagcattgctttctgaaattagggcccaattaataatcagcaagaatttgatcgttccagttcccacttggaggcctttcatccctcgggtgtgctatggatggcttctaacaaaaactacacatatgtattcctgatcgccaacctttcccccaccagctaaggacatttcccagggttaatagggcctggtccctgggaggaaatttgaatgggtccattttgcccttccatagcctaatccctgggcattgctttccactgaggttgggggttggggtgtactagttacacatcttcaacagaccccctctagaaatttttcagatgcttctgggagacacccaaagggtgaagctatttatctgtagtaaactatttatctgtgtttttgaaatattaaaccctggatcagtcctttgatcagtataattttttaaagttactttgtcagaggcacaaaagggtttaaactgattcataataaatatctgtacttcttcgatcttcaccttttgtgctgtgattcttcagtttctaaaccagcactgtctgggtccctacaatgtatcaggaagagctgagaatggtaaggagactcttctaagtcttcatctcagagaccctgagttcccactcagacccactcagccaaatctcatggaagaccaaggagggcagcactgtttttgttttttgttttttacactgtccaaaggttttccatcctgtcctggaatcagagttggaagctgaggagcttcagcctcttttatggtttaatggccacctgttctctcctgtgaaaggctttgcaaagtcacattaagtttgcatgacctgttatccctggggccctatttcatagaggctggccctattagtgatttccaaaaacaatatggaagtgccttttgatgtcttacaataagagaagaagccaatggaaatgaaagagattggcaaaggggaaggatgatgccatgtagatcctgtttgacatttttatggctgtatttgtaaacttaaacacaccagtgtctgttcttgatgcagttgctatttaggatgagttaagtgcctggggagtccctcaaaaggttaaagggattcccatcattggaatcttatcaccagataggcaagtttatgaccaaacaagagagtactggctttatcctctaacctcatattttctcccacttggcaagtcctttgtggcatttattcatcagtcagggtgtccgattggtcctagaacttccaaaggctgcttgtcatagaagccattgcatctataaagcaacggctcctgttaaatggtatctcctttctgaggctcctactaaaagtcatttgttacctaaacttatgtgcttaacaggcaatgcttctcagaccacaaagcagaaagaagaagaaaagctcctgactaaatcagggctgggcttagacagagttgatctgtagaatatctttaaaggagagatgtcaactttctgcactattcccagcctctgctcctccctgtctaccctctcccctccctctctccctccacttcaccccacaatctttggtctggatttctttttattttcttttcaacttgaaagaaactggacattaggccactatgtgttgttactgccactagtgttcaagtgcctcttgttttcccagagatttcctgggtctgccagaggcccagacaggctcactcaagctctttaactgaaaagcaacaagccactccaggacaaggttcaaaatggttacaacagcctctacctgtcgccccagggagaaaggggtagtgatacaagtctcatagccagagatggttttccactccttctagatattcccaaaaagaggctgagacaggaggttattttcaattttattttggaattaaatacttttttccctttattactgttgtagtccctcacttggatatacctctgttttcacgatagaaataagggaggtctagagcttctattccttggccattgtcaacggagagctggccaagtcttcacaaacccttgcaacattgcctgaagtttatggaataagatgtattctcactcccttgatctcaagggcgtaactctggaagcacagcttgactacacgtcatttttaccaatgattttcaggtgacctgggctaagtcatttaaactgggtctttataaaagtaaaaggccaacatttaattattttgcaaagcaacctaagagctaaagatgtaatttttcttgcaattgtaaatcttttgtgtctcctgaagacttcccttaaaattagctctgagtgaaaaatcaaaagagacaaaagacatcttcgaatccatatttcaagcctggtagaattggcttttctagcagaacctttccaaaagttttatattgagattcataacaacaccaagaattgattttgtagccaacattcattcaatactgttatatcagaggagtaggagagaggaaacatttgacttatctggaaaagcaaaatgtacttaagaataagaataacatggtccattcacctttatgttatagatatgtctttgtgtaaatcatttgttttgagttttcaaagaatagcccattgttcattcttgtgctgtacaatgaccactgttattgttactttgacttttcagagcacacccttcctctggtttttgtatatttattgatggatcaataataatgaggaaagcatgatatgtatattgctgagttgaaagcacttattggaaaatattaaaaggctaacattaaaagactaaaggaaacagactcagaa

SEQ ID NO: 598 - DNA, 4723 bp, Homo sapiens
gagaagaaagccagtgcgtctctgggcgcaggggccagtggggctcggaggcacaggcaccccgcgacactccaggttccccgacccacgtccctggcagccccgattatttacagcctcagcagagcacggggcgggggcagaggggcccgcccgggagggctgctacttcttaaaacctctgcgggctgcttagtcacagccccccttgcttgggtgtgtccttcgctcgctccctccctccgtcttaggtcactgttttcaacctcgaataaaaactgcagccaacttccgaggcagcctcattgcccagcggaccccagcctctgccaggttcggtccgccatcctcgtcccgtcctccgccggcccctgccccgcgcccagggatcctccagctcctttcgcccgcgccctccgttcgctccggacaccatggacaagttttggtggcacgcagcctggggactctgcctcgtgccgctgagcctggcgcagatcgatttgaatataacctgccgctttgcaggtgtattccacgtggagaaaaatggtcgctacagcatctctcggacggaggccgctgacctctgcaaggctttcaatagcaccttgcccacaatggcccagatggagaaagctctgagcatcggatttgagacctgcaggtatgggttcatagaagggcacgtggtgattccccggatccaccccaactccatctgtgcagcaaacaacacaggggtgtacatcctcacatccaacacctcccagtatgacacatattgcttcaatgcttcagctccacctgaagaagattgtacatcagtcacagacctgcccaatgcctttgatggaccaattaccataactattgttaaccgtgatggcacccgctatgtccagaaaggagaatacagaacgaatcctgaagacatctaccccagcaaccctactgatgatgacgtgagcagcggctcctccagtgaaaggagcagcacttcaggaggttacatcttttacaccttttctactgtacaccccatcccagacgaagacagtccctggatcaccgacagcacagacagaatccctgctaccaatatggactccagtcatagtataacgcttcagcctactgcaaatccaaacacaggtttggtggaagatttggacaggacaggacctctttcaatgacaacgcagcagagtaattctcagagcttctctacatcacatgaaggcttggaagaagataaagaccatccaacaacttctactctgacatcaagcagagaccaagacacattccaccccagtggggggtcccataccactcatggatctgaatcagatggacactcacatgggagtcaagaaggtggagcaaacacaacctctggtcctataaggacaccccaaattccagaatggctgatcatcttggcatccctcttggccttggctttgattcttgcagtttgcattgcagtcaacagtcgaagaaggtgtgggcagaagaaaaagctagtgatcaacagtggcaatggagctgtggaggacagaaagccaagtggactcaacggagaggccagcaagtctcaggaaatggtgcatttggtgaacaaggagtcgtcagaaactccagaccagtttatgacagctgatgagacaaggaacctgcagaatgtggacatgaagattggggtgtaacacctacaccattatcttggaaagaaacaaccgttggaaacataaccattacagggagctgggacacttaacagatgcaatgtgctactgattgtttcattgcgaatcttttttagcataaaattttctactctttttgttttttgtgttttgttctttaaagtcaggtccaatttgtaaaaacagcattgctttctgaaattagggcccaattaataatcagcaagaatttgatcgttccagttcccacttggaggcctttcatccctcgggtgtgctatggatggcttctaacaaaaactacacatatgtattcctgatcgccaacctttcccccaccagctaaggacatttcccagggttaatagggcctggtccctgggaggaaatttgaatgggtccattttgcccttccatagcctaatccctgggcattgctttccactgaggttgggggttggggtgtactagttacacatcttcaacagaccccctctagaaatttttcagatgcttctgggagacacccaaagggtgaagctatttatctgtagtaaactatttatctgtgtttttgaaatattaaaccctggatcagtcctttgatcagtataattttttaaagttactttgtcagaggcacaaaagggtttaaactgattcataataaatatctgtacttcttcgatcttcaccttttgtgctgtgattcttcagtttctaaaccagcactgtctgggtccctacaatgtatcaggaagagctgagaatggtaaggagactcttctaagtcttcatctcagagaccctgagttcccactcagacccactcagccaaatctcatggaagaccaaggagggcagcactgtttttgttttttgttttttacactgtccaaaggttttccatcctgtcctggaatcagagttggaagctgaggagcttcagcctcttttatggtttaatggccacctgttctctcctgtgaaaggctttgcaaagtcacattaagtttgcatgacctgttatccctggggccctatttcatagaggctggccctattagtgatttccaaaaacaatatggaagtgccttttgatgtcttacaataagagaagaagccaatggaaatgaaagagattggcaaaggggaaggatgatgccatgtagatcctgtttgacatttttatggctgtatttgtaaacttaaacacaccagtgtctgttcttgatgcagttgctatttaggatgagttaagtgcctggggagtccctcaaaaggttaaagggattcccatcattggaatcttatcaccagataggcaagtttatgaccaaacaagagagtactggctttatcctctaacctcatattttctcccacttggcaagtcctttgtggcatttattcatcagtcagggtgtccgattggtcctagaacttccaaaggctgcttgtcatagaagccattgcatctataaagcaacggctcctgttaaatggtatctcctttctgaggctcctactaaaagtcatttgttacctaaacttatgtgcttaacaggcaatgcttctcagaccacaaagcagaaagaagaagaaaagctcctgactaaatcagggctgggcttagacagagttgatctgtagaatatctttaaaggagagatgtcaactttctgcactattcccagcctctgctcctccctgtctaccctctcccctccctctctccctccacttcaccccacaatctttggtctggatttctttttattttcttttcaacttgaaagaaactggacattaggccactatgtgttgttactgccactagtgttcaagtgcctcttgttttcccagagatttcctgggtctgccagaggcccagacaggctcactcaagctctttaactgaaaagcaacaagccactccaggacaaggttcaaaatggttacaacagcctctacctgtcgccccagggagaaaggggtagtgatacaagtctcatagccagagatggttttccactccttctagatattcccaaaaagaggctgagacaggaggttattttcaattttattttggaattaaatacttttttccctttattactgttgtagtccctcacttggatatacctctgttttcacgatagaaataagggaggtctagagcttctattccttggccattgtcaacggagagctggccaagtcttcacaaacccttgcaacattgcctgaagtttatggaataagatgtattctcactcccttgatctcaagggcgtaactctggaagcacagcttgactacacgtcatttttaccaatgattttcaggtgacctgggctaagtcatttaaactgggtctttataaaagtaaaaggccaacatttaattattttgcaaagcaacctaagagctaaagatgtaatttttcttgcaattgtaaatcttttgtgtctcctgaagacttcccttaaaattagctctgagtgaaaaatcaaaagagacaaaagacatcttcgaatccatatttcaagcctggtagaattggcttttctagcagaacctttccaaaagttttatattgagattcataacaacaccaagaattgattttgtagccaacattcattcaatactgttatatcagaggagtaggagagaggaaacatttgacttatctggaaaagcaaaatgtacttaagaataagaataacatggtccattcacctttatgttatagatatgtctttgtgtaaatcatttgttttgagttttcaaagaatagcccattgttcattcttgtgctgtacaatgaccactgttattgttactttgacttttcagagcacacccttcctctggtttttgtatatttattgatggatcaataataatgaggaaagcatgatatgtatattgctgagttgaaagcacttattggaaaatattaaaaggctaacattaaaagactaaaggaaacagactcagaa

SEQ ID NO: 599 - DNA, 5468 bp, Homo sapiens
gagaagaaagccagtgcgtctctgggcgcaggggccagtggggctcggaggcacaggcaccccgcgacactccaggttccccgacccacgtccctggcagccccgattatttacagcctcagcagagcacggggcgggggcagaggggcccgcccgggagggctgctacttcttaaaacctctgcgggctgcttagtcacagccccccttgcttgggtgtgtccttcgctcgctccctccctccgtcttaggtcactgttttcaacctcgaataaaaactgcagccaacttccgaggcagcctcattgcccagcggaccccagcctctgccaggttcggtccgccatcctcgtcccgtcctccgccggcccctgccccgcgcccagggatcctccagctcctttcgcccgcgccctccgttcgctccggacaccatggacaagttttggtggcacgcagcctggggactctgcctcgtgccgctgagcctggcgcagatcgatttgaatataacctgccgctttgcaggtgtattccacgtggagaaaaatggtcgctacagcatctctcggacggaggccgctgacctctgcaaggctttcaatagcaccttgcccacaatggcccagatggagaaagctctgagcatcggatttgagacctgcaggtatgggttcatagaagggcacgtggtgattccccggatccaccccaactccatctgtgcagcaaacaacacaggggtgtacatcctcacatccaacacctcccagtatgacacatattgcttcaatgcttcagctccacctgaagaagattgtacatcagtcacagacctgcccaatgcctttgatggaccaattaccataactattgttaaccgtgatggcacccgctatgtccagaaaggagaatacagaacgaatcctgaagacatctaccccagcaaccctactgatgatgacgtgagcagcggctcctccagtgaaaggagcagcacttcaggaggttacatcttttacaccttttctactgtacaccccatcccagacgaagacagtccctggatcaccgacagcacagacagaatccctgctaccactttgatgagcactagtgctacagcaactgagacagcaaccaagaggcaagaaacctgggattggttttcatggttgtttctaccatcagagtcaaagaatcatcttcacacaacaacacaaatggctgcaggctgggagccaaatgaagaaaatgaagatgaaagagacagacacctcagtttttctggatcaggcattgatgatgatgaagattttatctccagcaccatttcaaccacaccacgggcttttgaccacacaaaacagaaccaggactggacccagtggaacccaagccattcaaatccggaagtgctacttcagacaaccacaaggatgactgatgtagacagaaatggcaccactgcttatgaaggaaactggaacccagaagcacaccctcccctcattcaccatgagcatcatgaggaagaagagaccccacattctacaagcacaacagcctcagctcataccagccatccaatgcaaggaaggacaacaccaagcccagaggacagttcctggactgatttcttcaacccaatctcacaccccatgggacgaggtcatcaagcaggaagaaggatggatatggactccagtcatagtataacgcttcagcctactgcaaatccaaacacaggtttggtggaagatttggacaggacaggacctctttcaatgacaacgcagcagagtaattctcagagcttctctacatcacatgaaggcttggaagaagataaagaccatccaacaacttctactctgacatcaagcaataggaatgatgtcacaggtggaagaagagacccaaatcattctgaaggctcaactactttactggaaggttatacctctcattacccacacacgaaggaaagcaggaccttcatcccagtgacctcagctaagactgggtcctttggagttactgcagttactgttggagattccaactctaatgtcaatcgttccttatcaggagaccaagacacattccaccccagtggggggtcccataccactcatggatctgaatcagatggacactcacatgggagtcaagaaggtggagcaaacacaacctctggtcctataaggacaccccaaattccagaatggctgatcatcttggcatccctcttggccttggctttgattcttgcagtttgcattgcagtcaacagtcgaagaaggtgtgggcagaagaaaaagctagtgatcaacagtggcaatggagctgtggaggacagaaagccaagtggactcaacggagaggccagcaagtctcaggaaatggtgcatttggtgaacaaggagtcgtcagaaactccagaccagtttatgacagctgatgagacaaggaacctgcagaatgtggacatgaagattggggtgtaacacctacaccattatcttggaaagaaacaaccgttggaaacataaccattacagggagctgggacacttaacagatgcaatgtgctactgattgtttcattgcgaatcttttttagcataaaattttctactctttttgttttttgtgttttgttctttaaagtcaggtccaatttgtaaaaacagcattgctttctgaaattagggcccaattaataatcagcaagaatttgatcgttccagttcccacttggaggcctttcatccctcgggtgtgctatggatggcttctaagacatttcccagggttaatagggcctggtccctgggaggaaatttgaatgggtccattttgcccttccatagcctaatccctgggcattgctttccactgaggttgggggttggggtgtactagttacacatcttcaacagaccccctctagaaatttttcagatgcttctgggagacacccaaagggtgaagctatttatctgtagtaaactatttatctgtgtttttgaaatattaaaccctggatcagtcctttgatcagtataattttttaaagttactttgtcagaggcacaaaagggtttaaactgattcataataaatatctgtacttcttcgatcttcaccttttgtgctgtgattcttcagtttctaaaccagcactgtctgggtccctacaatgtatcaggaagagctgagaatggtaaggagactcttctaagtcttcatctcagagaccctgagttcccactcagacccactcagccaaatctcatggaagaccaaggagggcagcactgtttttgttttttgttttttacactgtccaaaggttttccatcctgtcctggaatcagagttggaagctgaggagcttcagcctcttttatggtttaatggccacctgttctctcctgtgaaaggctttgcaaagtcacattaagtttgcatgacctgttatccctggggccctatttcatagaggctggccctattagtgatttccaaaaacaatatggaagtgccttttgatgtcttacaataagagaagaagccaatggaaatgaaagagattggcaaaggggaaggatgatgccatgtagatcctgtttgacatttttatggctgtatttgtaaacttaaacacaccagtgtctgttcttgatgcagttgctatttaggatgagttaagtgcctggggagtccctcaaaaggttaaagggattcccatcattggaatcttatcaccagataggcaagtttatgaccaaacaagagagtactggctttatcctctaacctcatattttctcccacttggcaagtcctttgtggcatttattcatcagtcagggtgtccgattggtcctagaacttccaaaggctgcttgtcatagaagccattgcatctataaagcaacggctcctgttaaatggtatctcctttctgaggctcctactaaaagtcatttgttacctaaacttatgtgcttaacaggcaatgcttctcagaccacaaagcagaaagaagaagaaaagctcctgactaaatcagggctgggcttagacagagttgatctgtagaatatctttaaaggagagatgtcaactttctgcactattcccagcctctgctcctccctgtctaccctctcccctccctctctccctccacttcaccccacaatctttggtctggatttctttttattttcttttcaacttgaaagaaactggacattaggccactatgtgttgttactgccactagtgttcaagtgcctcttgttttcccagagatttcctgggtctgccagaggcccagacaggctcactcaagctctttaactgaaaagcaacaagccactccaggacaaggttcaaaatggttacaacagcctctacctgtcgccccagggagaaaggggtagtgatacaagtctcatagccagagatggttttccactccttctagatattcccaaaaagaggctgagacaggaggttattttcaattttattttggaattaaatacttttttccctttattactgttgtagtccctcacttggatatacctctgttttcacgatagaaataagggaggtctagagcttctattccttggccattgtcaacggagagctggccaagtcttcacaaacccttgcaacattgcctgaagtttatggaataagatgtattctcactcccttgatctcaagggcgtaactctggaagcacagcttgactacacgtcatttttaccaatgattttcaggtgacctgggctaagtcatttaaactgggtctttataaaagtaaaaggccaacatttaattattttgcaaagcaacctaagagctaaagatgtaatttttcttgcaattgtaaatcttttgtgtctcctgaagacttcccttaaaattagctctgagtgaaaaatcaaaagagacaaaagacatcttcgaatccatatttcaagcctggtagaattggcttttctagcagaacctttccaaaagttttatattgagattcataacaacaccaagaattgattttgtagccaacattcattcaatactgttatatcagaggagtaggagagaggaaacatttgacttatctggaaaagcaaaatgtacttaagaataagaataacatggtccattcacctttatgttatagatatgtctttgtgtaaatcatttgttttgagttttcaaagaatagcccattgttcattcttgtgctgtacaatgaccactgttattgttactttgacttttcagagcacacccttcctctggtttttgtatatttattgatggatcaataataatgaggaaagcatgatatgtatattgctgagttgaaagcacttattggaaaatattaaaaggctaacattaaaagactaaaggaaacagactcagaa

SEQ ID NO: 600 - DNA, 5452 bp, Homo sapiens
gagaagaaagccagtgcgtctctgggcgcaggggccagtggggctcggaggcacaggcaccccgcgacactccaggttccccgacccacgtccctggcagccccgattatttacagcctcagcagagcacggggcgggggcagaggggcccgcccgggagggctgctacttcttaaaacctctgcgggctgcttagtcacagccccccttgcttgggtgtgtccttcgctcgctccctccctccgtcttaggtcactgttttcaacctcgaataaaaactgcagccaacttccgaggcagcctcattgcccagcggaccccagcctctgccaggttcggtccgccatcctcgtcccgtcctccgccggcccctgccccgcgcccagggatcctccagctcctttcgcccgcgccctccgttcgctccggacaccatggacaagttttggtggcacgcagcctggggactctgcctcgtgccgctgagcctggcgcagatcgatttgaatataacctgccgctttgcaggtgtattccacgtggagaaaaatggtcgctacagcatctctcggacggaggccgctgacctctgcaaggctttcaatagcaccttgcccacaatggcccagatggagaaagctctgagcatcggatttgagacctgcaggtatgggttcatagaagggcacgtggtgattccccggatccaccccaactccatctgtgcagcaaacaacacaggggtgtacatcctcacatccaacacctcccagtatgacacatattgcttcaatgcttcagctccacctgaagaagattgtacatcagtcacagacctgcccaatgcctttgatggaccaattaccataactattgttaaccgtgatggcacccgctatgtccagaaaggagaatacagaacgaatcctgaagacatctaccccagcaaccctactgatgatgacgtgagcagcggctcctccagtgaaaggagcagcacttcaggagctttgatgagcactagtgctacagcaactgagacagcaaccaagaggcaagaaacctgggattggttttcatggttgtttctaccatcagagtcaaagaatcatcttcacacaacaacacaaatggctggtacgtcttcaaataccatctcagcaggctgggagccaaatgaagaaaatgaagatgaaagagacagacacctcagtttttctggatcaggcattgatgatgatgaagattttatctccagcaccatttcaaccacaccacgggcttttgaccacacaaaacagaaccaggactggacccagtggaacccaagccattcaaatccggaagtgctacttcagacaaccacaaggatgactgatgtagacagaaatggcaccactgcttatgaaggaaactggaacccagaagcacaccctcccctcattcaccatgagcatcatgaggaagaagagaccccacattctacaagcacaacagcctcagctcataccagccatccaatgcaaggaaggacaacaccaagcccagaggacagttcctggactgatttcttcaacccaatctcacaccccatgggacgaggtcatcaagcaggaagaaggatggatatggactccagtcatagtataacgcttcagcctactgcaaatccaaacacaggtttggtggaagatttggacaggacaggacctctttcaatgacaacgcagcagagtaattctcagagcttctctacatcacatgaaggcttggaagaagataaagaccatccaacaacttctactctgacatcaagcaataggaatgatgtcacaggtggaagaagagacccaaatcattctgaaggctcaactactttactggaaggttatacctctcattacccacacacgaaggaaagcaggaccttcatcccagtgacctcagctaagactgggtcctttggagttactgcagttactgttggagattccaactctaatgtcaatcgttccttatcaggagaccaagacacattccaccccagtggggggtcccataccactcatggatctgaatcagatggacactcacatgggagtcaagaaggtggagcaaacacaacctctggtcctataaggacaccccaaattccagaatggctgatcatcttggcatccctcttggccttggctttgattcttgcagtttgcattgcagtcaacagtcgaagaaggtgtgggcagaagaaaaagctagtgatcaacagtggcaatggagctgtggaggacagaaagccaagtggactcaacggagaggccagcaagtctcaggaaatggtgcatttggtgaacaaggagtcgtcagaaactccagaccagtttatgacagctgatgagacaaggaacctgcagaatgtggacatgaagattggggtgtaacacctacaccattatcttggaaagaaacaaccgttggaaacataaccattacagggagctgggacacttaacagatgcaatgtgctactgattgtttcattgcgaatcttttttagcataaaattttctactctttttgttttttgtgttttgttctttaaagtcaggtccaatttgtaaaaacagcattgctttctgaaattagggcccaattaataatcagcaagaatttgatcgttccagttcccacttggaggcctttcatccctcgggtgtgctatggatggcttctaacaaaaactacacatatgtattcctgatcgccaacctttcccccaccagctaaggacatttcccagggttaatagggcctggtccctgggaggaaatttgaatgggtccattttgcccttccatagcctaatccctgggcattgctttccactgaggttgggggttggggtgtactagttacacatcttcaacagaccccctctagaaatttttcagatgcttctgggagacacccaaagggtgaagctatttatctgtagtaaactatttatctgtgtttttgaaatattaaaccctggatcagtcctttgatcagtataattttttaaagttactttgtcagaggcacaaaagggtttaaactgattcataataaatatctgtacttcttcgatcttcaccttttgtgctgtgattcttcagtttctaaaccagcactgtctgggtccctacaatgtatcaggaagagctgagaatggtaaggagactcttctaagtcttcatctcagagaccctgagttcccactcagacccactcagccaaatctcatggaagaccaaggagggcagcactgtttttgttttttgttttttacactgtccaaaggttttccatcctgtcctggaatcagagttggaagctgaggagcttcagcctcttttatggtttaatggccacctgttctctcctgtgaaaggctttgcaaagtcacattaagtttgcatgacctgttatccctggggccctatttcatagaggctggccctattagtgatttccaaaaacaatatggaagtgccttttgatgtcttacaataagagaagaagccaatggaaatgaaagagattggcaaaggggaaggatgatgccatgtagatcctgtttgacatttttatggctgtatttgtaaacttaaacacaccagtgtctgttcttgatgcagttgctatttaggatgagttaagtgcctggggagtccctcaaaaggttaaagggattcccatcattggaatcttatcaccagataggcaagtttatgaccaaacaagagagtactggctttatcctctaacctcatattttctcccacttggcaagtcctttgtggcatttattcatcagtcagggtgtccgattggtcctagaacttccaaaggctgcttgtcatagaagccattgcatctataaagcaacggctcctgttaaatggtatctcctttctgaggctcctactaaaagtcatttgttacctaaacttatgtgcttaacaggcaatgcttctcagaccacaaagcagaaagaagaagaaaagctcctgactaaatcagggctgggcttagacagagttgatctgtagaatatctttaaaggagagatgtcaactttctgcactattcccagcctctgctcctccctgtctaccctctcccctccctctctccctccacttcaccccacaatctttggtctggatttctttttattttcttttcaacttgaaagaaactggacattaggccactatgtgttgttactgccactagtgttcaagtgcctcttgttttcccagagatttcctgggtctgccagaggcccagacaggctcactcaagctctttaactgaaaagcaacaagccactccaggacaaggttcaaaatggttacaacagcctctacctgtcgccccagggagaaaggggtagtgatacaagtctcatagccagagatggttttccactccttctagatattcccaaaaagaggctgagacaggaggttattttcaattttattttggaattaaatacttttttccctttattactgttgtagtccctcacttggatatacctctgttttcacgatagaaataagggaggtctagagcttctattccttggccattgtcaacggagagctggccaagtcttcacaaacccttgcaacattgcctgaagtttatggaataagatgtattctcactcccttgatctcaagggcgtaactctggaagcacagcttgactacacgtcatttttaccaatgattttcaggtgacctgggctaagtcatttaaactgggtctttataaaagtaaaaggccaacatttaattattttgcaaagcaacctaagagctaaagatgtaatttttcttgcaattgtaaatcttttgtgtctcctgaagacttcccttaaaattagctctgagtgaaaaatcaaaagagacaaaagacatcttcgaatccatatttcaagcctggtagaattggcttttctagcagaacctttccaaaagttttatattgagattcataacaacaccaagaattgattttgtagccaacattcattcaatactgttatatcagaggagtaggagagaggaaacatttgacttatctggaaaagcaaaatgtacttaagaataagaataacatggtccattcacctttatgttatagatatgtctttgtgtaaatcatttgttttgagttttcaaagaatagcccattgttcattcttgtgctgtacaatgaccactgttattgttactttgacttttcagagcacacccttcctctggtttttgtatatttattgatggatcaataataatgaggaaagcatgatatgtatattgctgagttgaaagcacttattggaaaatattaaaaggctaacattaaaagactaaaggaaacagactcagaa

SEQ ID NO: 601 - DNA, 905 bp, Homo sapiens
gcaggctggtcccctgacaggttgaagcaagtagacgcccaggagccccgggagggggctgcagtttccttccttccttctcggcagcgctccgcgcccccatcgcccctcctgcgctagcggaggtgatcgccgcggcgatgccggaggagggttcgggctgctcggtgcggcgcaggccctatgggtgcgtcctgcgggctgctttggtcccattggtcgcgggcttggtgatctgcctcgtggtgtgcatccagcgcttcgcacaggctcagcagcagctgccgctcgagtcacttgggtgggacgtagctgagctgcagctgaatcacacaggacctcagcaggaccccaggctatactggcaggggggcccagcactgggccgctccttcctgcatggaccagagctggacaaggggcagctacgtatccatcgtgatggcatctacatggtacacatccaggtgacgctggccatctgctcctccacgacggcctccaggcaccaccccaccaccctggccgtgggaatctgctctcccgcctcccgtagcatcagcctgctgcgtctcagcttccaccaaggttgtaccattgcctcccagcgcctgacgcccctggcccgaggggacacactctgcaccaacctcactgggacacttttgccttcccgaaacactgatgagaccttctttggagtgcagtgggtgcgcccctgaccactgctgctgattagggttttttaaattttattttattttatttaagttcaagagaaaaagtgtacacacaggggccacccggggttggggtgggagtgtggtggggggtagtggtggcaggacaagagaaggcattgagctttttctttcattttcctattaaaaaatacaaaaatcagc

SEQ ID NO: 602 - DNA, 849 bp, Homo sapiens
gcaggctggtcccctgacaggttgaagcaagtagacgcccaggagccccgggagggggctgcagtttccttccttccttctcggcagcgctccgcgcccccatcgcccctcctgcgctagcggaggtgatcgccgcggcgatgccggaggagggttcgggctgctcggtgcggcgcaggccctatgggtgcgtcctgcgggctgctttggtcccattggtcgcgggcttggtgatctgcctcgtggtgtgcatccagcgcttcgcacaggctcagcagcagctgccgctcgagtcacttgggtgggacgtagctgagctgcagctgaatcacacaggacctcagcaggaccccaggctatactggcaggggggcccagcactgggccgctccttcctgcatggaccagagctggacaaggggcagctacgtatccatcgtgatggcatctacatggtacacatccaggtgacgctggccatctgctcctccacgacggcctccaggcaccaccccaccaccctggccgtgggaatctgctctcccgcctcccgtagcatcagcctgctgcgtctcagcttccaccaaggttgtaccattgcctcccagcgcctgacgcccctggcccgaggggacacactctgcaccaacctcactgggacacttttgccttcccgaaacactgatgagaccttctttggagtgcagtgggtgcgcccctgaccactgctgctgattagggttttttaaattttattttattttatttaagttcaagagaaaaatgtggtggggggtagtggtggcaggacaagagaaggcattgagctttttctttcattttcctatt

SEQ ID NO: 603 - DNA, 5829 bp, Homo sapiens
gccctcggacagtccctgctcgcccgcgcgctgcagccccatctcctagcggcagcccaggcgcggagggagcgagtccgccccgaggaggaagaggatggcagggccacgccccagcccatgggccaggctgctcctggcagccttgatcagcgtcagcctctctgggaccttggcaaaccgctgcaagaaggccccagtgaagagctgcacggagtgtgtccgtgtggataaggactgcgcctactgcacagacgagatgttcagggaccggcgctgcaacacccaggcggagctgctggccgcgggctgccagcgggagagcatcgtggtcatggagagcagcttccaaatcacagaggagacccagattgacaccaccctgcggcgcagccagatgtccccccaaggcctgcgggtccgtctgcggcccggtgaggagcggcattttgagctggaggtgtttgagccactggagagccccgtggacctgtacatcctcatggacttctccaactccatgtccgatgatctggacaacctcaagaagatggggcagaacctggctcgggtcctgagccagctcaccagcgactacactattggatttggcaagtttgtggacaaagtcagcgtcccgcagacggacatgaggcctgagaagctgaaggagccctggcccaacagtgacccccccttctccttcaagaacgtcatcagcctgacagaagatgtggatgagttccggaataaactgcagggagagcggatctcaggcaacctggatgctcctgagggcggcttcgatgccatcctgcagacagctgtgtgcacgagggacattggctggcgcccggacagcacccacctgctggtcttctccaccgagtcagccttccactatgaggctgatggcgccaacgtgctggctggcatcatgagccgcaacgatgaacggtgccacctggacaccacgggcacctacacccagtacaggacacaggactacccgtcggtgcccaccctggtgcgcctgctcgccaagcacaacatcatccccatctttgctgtcaccaactactcctatagctactacgagaagcttcacacctatttccctgtctcctcactgggggtgctgcaggaggactcgtccaacatcgtggagctgctggaggaggccttcaatcggatccgctccaacctggacatccgggccctagacagcccccgaggccttcggacagaggtcacctccaagatgttccagaagacgaggactgggtcctttcacatccggcggggggaagtgggtatataccaggtgcagctgcgggcccttgagcacgtggatgggacgcacgtgtgccagctgccggaggaccagaagggcaacatccatctgaaaccttccttctccgacggcctcaagatggacgcgggcatcatctgtgatgtgtgcacctgcgagctgcaaaaagaggtgcggtcagctcgctgcagcttcaacggagacttcgtgtgcggacagtgtgtgtgcagcgagggctggagtggccagacctgcaactgctccaccggctctctgagtgacattcagccctgcctgcgggagggcgaggacaagccgtgctccggccgtggggagtgccagtgcgggcactgtgtgtgctacggcgaaggccgctacgagggtcagttctgcgagtatgacaacttccagtgtccccgcacttccgggttcctctgcaatgaccgaggacgctgctccatgggccagtgtgtgtgtgagcctggttggacaggcccaagctgtgactgtcccctcagcaatgccacctgcatcgacagcaatgggggcatctgtaatggacgtggccactgtgagtgtggccgctgccactgccaccagcagtcgctctacacggacaccatctgcgagatcaactactcggcgatccacccgggcctctgcgaggacctacgctcctgcgtgcagtgccaggcgtggggcaccggcgagaagaaggggcgcacgtgtgaggaatgcaacttcaaggtcaagatggtggacgagcttaagagagccgaggaggtggtggtgcgctgctccttccgggacgaggatgacgactgcacctacagctacaccatggaaggtgacggcgcccctgggcccaacagcactgtcctggtgcacaagaagaaggactgccctccgggctccttctggtggctcatccccctgctcctcctcctcctgccgctcctggccctgctactgctgctatgctggaagtactgtgcctgctgcaaggcctgcctggcacttctcccgtgctgcaaccgaggtcacatggtgggctttaaggaagaccactacatgctgcgggagaacctgatggcctctgaccacttggacacgcccatgctgcgcagcgggaacctcaagggccgtgacgtggtccgctggaaggtcaccaacaacatgcagcggcctggctttgccactcatgccgccagcatcaaccccacagagctggtgccctacgggctgtccttgcgcctggcccgcctttgcaccgagaacctgctgaagcctgacactcgggagtgcgcccagctgcgccaggaggtggaggagaacctgaacgaggtctacaggcagatctccggtgtacacaagctccagcagaccaagttccggcagcagcccaatgccgggaaaaagcaagaccacaccattgtggacacagtgctgatggcgccccgctcggccaagccggccctgctgaagcttacagagaagcaggtggaacagagggccttccacgacctcaaggtggcccccggctactacaccctcactgcagaccaggacgcccggggcatggtggagttccaggagggcgtggagctggtggacgtacgggtgcccctctttatccggcctgaggatgacgacgagaagcagctgctggtggaggccatcgacgtgcccgcaggcactgccaccctcggccgccgcctggtaaacatcaccatcatcaaggagcaagccagagacgtggtgtcctttgagcagcctgagttctcggtcagccgcggggaccaggtggcccgcatccctgtcatccggcgtgtcctggacggcgggaagtcccaggtctcctaccgcacacaggatggcaccgcgcagggcaaccgggactacatccccgtggagggtgagctgctgttccagcctggggaggcctggaaagagctgcaggtgaagctcctggagctgcaagaagttgactccctcctgcggggccgccaggtccgccgtttccacgtccagctcagcaaccctaagtttggggcccacctgggccagccccactccaccaccatcatcatcagggacccagatgaactggaccggagcttcacgagtcagatgttgtcatcacagccaccccctcacggcgacctgggcgccccgcagaaccccaatgctaaggccgctgggtccaggaagatccatttcaactggctgcccccttctggcaagccaatggggtacagggtaaagtactggattcagggtgactccgaatccgaagcccacctgctcgacagcaaggtgccctcagtggagctcaccaacctgtacccgtattgcgactatgagatgaaggtgtgcgcctacggggctcagggcgagggaccctacagctccctggtgtcctgccgcacccaccaggaagtgcccagcgagccagggcgtctggccttcaatgtcgtctcctccacggtgacccagctgagctgggctgagccggctgagaccaacggtgagatcacagcctacgaggtctgctatggcctggtcaacgatgacaaccgacctattgggcccatgaagaaagtgctggttgacaaccctaagaaccggatgctgcttattgagaaccttcgggagtcccagccctaccgctacacggtgaaggcgcgcaacggggccggctgggggcctgagcgggaggccatcatcaacctggccacccagcccaagaggcccatgtccatccccatcatccctgacatccctatcgtggacgcccagagcggggaggactacgacagcttccttatgtacagcgatgacgttctacgctctccatcgggcagccagaggcccagcgtctccgatgacactggctgcggctggaagttcgagcccctgctgggggaggagctggacctgcggcgcgtcacgtggcggctgcccccggagctcatcccgcgcctgtcggccagcagcgggcgctcctccgacgccgaggcgccccacgggcccccggacgacggcggcgcgggcgggaagggcggcagcctgccccgcagtgcgacacccgggccccccggagagcacctggtgaatggccggatggactttgccttcccgggcagcaccaactccctgcacaggatgaccacgaccagtgctgctgcctatggcacccacctgagcccacacgtgccccaccgcgtgctaagcacatcctccaccctcacacgggactacaactcactgacccgctcagaacactcacactcgaccacactgccgagggactactccaccctcacctccgtctcctcccacgactctcgcctgactgctggtgtgcccgacacgcccacccgcctggtgttctctgccctggggcccacatctctcagagtgagctggcaggagccgcggtgcgagcggccgctgcagggctacagtgtggagtaccagctgctgaacggcggtgagctgcatcggctcaacatccccaaccctgcccagacctcggtggtggtggaagacctcctgcccaaccactcctacgtgttccgcgtgcgggcccagagccaggaaggctggggccgagagcgtgagggtgtcatcaccattgaatcccaggtgcacccgcagagcccactgtgtcccctgccaggctccgccttcactttgagcactcccagtgccccaggcccgctggtgttcactgccctgagcccagactcgctgcagctgagctgggagcggccacggaggcccaatggggatatcgtcggctacctggtgacctgtgagatggcccaaggaggagggccagccaccgcattccgggtggatggagacagccccgagagccggctgaccgtgccgggcctcagcgagaacgtgccctacaagttcaaggtgcaggccaggaccactgagggcttcgggccagagcgcgagggcatcatcaccatagagtcccaggatggaggacccttcccgcagctgggcagccgtgccgggctcttccagcacccgctgcaaagcgagtacagcagcatcaccaccacccacaccagcgccaccgagcccttcctagtggatgggctgaccctgggggcccagcacctggaggcaggcggctccctcacccggcatgtgacccaggagtttgtgagccggacactgaccaccagcggaacccttagcacccacatggaccaacagttcttccaaacttgaccgcaccctgccccacccccgccacgtcccactaggcgtcctcccgactcctctcccggagcctcctcagctactccatccttgcacccctgggggcccagcccacccgcatgcacagagcaggggctaggtgtctcctgggaggcatgaagggggcaaggtccgtcctctgtgggcccaaacctatttgtaaccaaagagctgggagcagcacaaggacccagcctttgttctgcacttaataaatggttttgctactgcta

SEQ ID NO: 604 - DNA, 5648 bp, Homo sapiens
cgcccgcgcgctgcagccccatctcctagcggcagcccaggcgcggagggagcgagtccgccccgaggtaggtccaggacgggcgcacagcagcagccgaggctggccgggagagggaggaagaggatggcagggccacgccccagcccatgggccaggctgctcctggcagccttgatcagcgtcagcctctctgggaccttggcaaaccgctgcaagaaggccccagtgaagagctgcacggagtgtgtccgtgtggataaggactgcgcctactgcacagacgagatgttcagggaccggcgctgcaacacccaggcggagctgctggccgcgggctgccagcgggagagcatcgtggtcatggagagcagcttccaaatcacagaggagacccagattgacaccaccctgcggcgcagccagatgtccccccaaggcctgcgggtccgtctgcggcccggtgaggagcggcattttgagctggaggtgtttgagccactggagagccccgtggacctgtacatcctcatggacttctccaactccatgtccgatgatctggacaacctcaagaagatggggcagaacctggctcgggtcctgagccagctcaccagcgactacactattggatttggcaagtttgtggacaaagtcagcgtcccgcagacggacatgaggcctgagaagctgaaggagccctggcccaacagtgacccccccttctccttcaagaacgtcatcagcctgacagaagatgtggatgagttccggaataaactgcagggagagcggatctcaggcaacctggatgctcctgagggcggcttcgatgccatcctgcagacagctgtgtgcacgagggacattggctggcgcccggacagcacccacctgctggtcttctccaccgagtcagccttccactatgaggctgatggcgccaacgtgctggctggcatcatgagccgcaacgatgaacggtgccacctggacaccacgggcacctacacccagtacaggacacaggactacccgtcggtgcccaccctggtgcgcctgctcgccaagcacaacatcatccccatctttgctgtcaccaactactcctatagctactacgagaagcttcacacctatttccctgtctcctcactgggggtgctgcaggaggactcgtccaacatcgtggagctgctggaggaggccttcaatcggatccgctccaacctggacatccgggccctagacagcccccgaggccttcggacagaggtcacctccaagatgttccagaagacgaggactgggtcctttcacatccggcggggggaagtgggtatataccaggtgcagctgcgggcccttgagcacgtggatgggacgcacgtgtgccagctgccggaggaccagaagggcaacatccatctgaaaccttccttctccgacggcctcaagatggacgcgggcatcatctgtgatgtgtgcacctgcgagctgcaaaaagaggtgcggtcagctcgctgcagcttcaacggagacttcgtgtgcggacagtgtgtgtgcagcgagggctggagtggccagacctgcaactgctccaccggctctctgagtgacattcagccctgcctgcgggagggcgaggacaagccgtgctccggccgtggggagtgccagtgcgggcactgtgtgtgctacggcgaaggccgctacgagggtcagttctgcgagtatgacaacttccagtgtccccgcacttccgggttcctctgcaatgaccgaggacgctgctccatgggccagtgtgtgtgtgagcctggttggacaggcccaagctgtgactgtcccctcagcaatgccacctgcatcgacagcaatgggggcatctgtaatggacgtggccactgtgagtgtggccgctgccactgccaccagcagtcgctctacacggacaccatctgcgagatcaactactcggcgatccacccgggcctctgcgaggacctacgctcctgcgtgcagtgccaggcgtggggcaccggcgagaagaaggggcgcacgtgtgaggaatgcaacttcaaggtcaagatggtggacgagcttaagagagccgaggaggtggtggtgcgctgctccttccgggacgaggatgacgactgcacctacagctacaccatggaaggtgacggcgcccctgggcccaacagcactgtcctggtgcacaagaagaaggactgccctccgggctccttctggtggctcatccccctgctcctcctcctcctgccgctcctggccctgctactgctgctatgctggaagtactgtgcctgctgcaaggcctgcctggcacttctcccgtgctgcaaccgaggtcacatggtgggctttaaggaagaccactacatgctgcgggagaacctgatggcctctgaccacttggacacgcccatgctgcgcagcgggaacctcaagggccgtgacgtggtccgctggaaggtcaccaacaacatgcagcggcctggctttgccactcatgccgccagcatcaaccccacagagctggtgccctacgggctgtccttgcgcctggcccgcctttgcaccgagaacctgctgaagcctgacactcgggagtgcgcccagctgcgccaggaggtggaggagaacctgaacgaggtctacaggcagatctccggtgtacacaagctccagcagaccaagttccggcagcagcccaatgccgggaaaaagcaagaccacaccattgtggacacagtgctgatggcgccccgctcggccaagccggccctgctgaagcttacagagaagcaggtggaacagagggccttccacgacctcaaggtggcccccggctactacaccctcactgcagaccaggacgcccggggcatggtggagttccaggagggcgtggagctggtggacgtacgggtgcccctctttatccggcctgaggatgacgacgagaagcagctgctggtggaggccatcgacgtgcccgcaggcactgccaccctcggccgccgcctggtaaacatcaccatcatcaaggagcaagccagagacgtggtgtcctttgagcagcctgagttctcggtcagccgcggggaccaggtggcccgcatccctgtcatccggcgtgtcctggacggcgggaagtcccaggtctcctaccgcacacaggatggcaccgcgcagggcaaccgggactacatccccgtggagggtgagctgctgttccagcctggggaggcctggaaagagctgcaggtgaagctcctggagctgcaagaagttgactccctcctgcggggccgccaggtccgccgtttccacgtccagctcagcaaccctaagtttggggcccacctgggccagccccactccaccaccatcatcatcagggacccagatgaactggaccggagcttcacgagtcagatgttgtcatcacagccaccccctcacggcgacctgggcgccccgcagaaccccaatgctaaggccgctgggtccaggaagatccatttcaactggctgcccccttctggcaagccaatggggtacagggtaaagtactggattcagggtgactccgaatccgaagcccacctgctcgacagcaaggtgccctcagtggagctcaccaacctgtacccgtattgcgactatgagatgaaggtgtgcgcctacggggctcagggcgagggaccctacagctccctggtgtcctgccgcacccaccaggaagtgcccagcgagccagggcgtctggccttcaatgtcgtctcctccacggtgacccagctgagctgggctgagccggctgagaccaacggtgagatcacagcctacgaggtctgctatggcctggtcaacgatgacaaccgacctattgggcccatgaagaaagtgctggttgacaaccctaagaaccggatgctgcttattgagaaccttcgggagtcccagccctaccgctacacggtgaaggcgcgcaacggggccggctgggggcctgagcgggaggccatcatcaacctggccacccagcccaagaggcccatgtccatccccatcatccctgacatccctatcgtggacgcccagagcggggaggactacgacagcttccttatgtacagcgatgacgttctacgctctccatcgggcagccagaggcccagcgtctccgatgacactgagcacctggtgaatggccggatggactttgccttcccgggcagcaccaactccctgcacaggatgaccacgaccagtgctgctgcctatggcacccacctgagcccacacgtgccccaccgcgtgctaagcacatcctccaccctcacacgggactacaactcactgacccgctcagaacactcacactcgaccacactgccgagggactactccaccctcacctccgtctcctcccacgactctcgcctgactgctggtgtgcccgacacgcccacccgcctggtgttctctgccctggggcccacatctctcagagtgagctggcaggagccgcggtgcgagcggccgctgcagggctacagtgtggagtaccagctgctgaacggcggtgagctgcatcggctcaacatccccaaccctgcccagacctcggtggtggtggaagacctcctgcccaaccactcctacgtgttccgcgtgcgggcccagagccaggaaggctggggccgagagcgtgagggtgtcatcaccattgaatcccaggtgcacccgcagagcccactgtgtcccctgccaggctccgccttcactttgagcactcccagtgccccaggcccgctggtgttcactgccctgagcccagactcgctgcagctgagctgggagcggccacggaggcccaatggggatatcgtcggctacctggtgacctgtgagatggcccaaggaggagggccagccaccgcattccgggtggatggagacagccccgagagccggctgaccgtgccgggcctcagcgagaacgtgccctacaagttcaaggtgcaggccaggaccactgagggcttcgggccagagcgcgagggcatcatcaccatagagtcccaggatggaggacccttcccgcagctgggcagccgtgccgggctcttccagcacccgctgcaaagcgagtacagcagcatcaccaccacccacaccagcgccaccgagcccttcctagtggatgggctgaccctgggggcccagcacctggaggcaggcggctccctcacccggcatgtgacccaggagtttgtgagccggacactgaccaccagcggaacccttagcacccacatggaccaacagttcttccaaacttgaccgcaccctgccccacccccgccacgtcccactaggcgtcctcccgactcctctcccggagcctcctcagctactccatccttgcacccctgggggcccagcccacccgcatgcacagagcaggggctaggtgtctcctgggaggcatgaagggggcaaggtccgtcctctgtgggcccaaacctatttgtaaccaaagagctgggagcagcacaaggacccagcctttgttctgcacttaataaatggttttgctactgcta

SEQ ID NO: 605 - DNA, 5619 bp, Homo sapiens
gccctcggacagtccctgctcgcccgcgcgctgcagccccatctcctagcggcagcccaggcgcggagggagcgagtccgccccgaggaggaagaggatggcagggccacgccccagcccatgggccaggctgctcctggcagccttgatcagcgtcagcctctctgggaccttggcaaaccgctgcaagaaggccccagtgaagagctgcacggagtgtgtccgtgtggataaggactgcgcctactgcacagacgagatgttcagggaccggcgctgcaacacccaggcggagctgctggccgcgggctgccagcgggagagcatcgtggtcatggagagcagcttccaaatcacagaggagacccagattgacaccaccctgcggcgcagccagatgtccccccaaggcctgcgggtccgtctgcggcccggtgaggagcggcattttgagctggaggtgtttgagccactggagagccccgtggacctgtacatcctcatggacttctccaactccatgtccgatgatctggacaacctcaagaagatggggcagaacctggctcgggtcctgagccagctcaccagcgactacactattggatttggcaagtttgtggacaaagtcagcgtcccgcagacggacatgaggcctgagaagctgaaggagccctggcccaacagtgacccccccttctccttcaagaacgtcatcagcctgacagaagatgtggatgagttccggaataaactgcagggagagcggatctcaggcaacctggatgctcctgagggcggcttcgatgccatcctgcagacagctgtgtgcacgagggacattggctggcgcccggacagcacccacctgctggtcttctccaccgagtcagccttccactatgaggctgatggcgccaacgtgctggctggcatcatgagccgcaacgatgaacggtgccacctggacaccacgggcacctacacccagtacaggacacaggactacccgtcggtgcccaccctggtgcgcctgctcgccaagcacaacatcatccccatctttgctgtcaccaactactcctatagctactacgagaagcttcacacctatttccctgtctcctcactgggggtgctgcaggaggactcgtccaacatcgtggagctgctggaggaggccttcaatcggatccgctccaacctggacatccgggccctagacagcccccgaggccttcggacagaggtcacctccaagatgttccagaagacgaggactgggtcctttcacatccggcggggggaagtgggtatataccaggtgcagctgcgggcccttgagcacgtggatgggacgcacgtgtgccagctgccggaggaccagaagggcaacatccatctgaaaccttccttctccgacggcctcaagatggacgcgggcatcatctgtgatgtgtgcacctgcgagctgcaaaaagaggtgcggtcagctcgctgcagcttcaacggagacttcgtgtgcggacagtgtgtgtgcagcgagggctggagtggccagacctgcaactgctccaccggctctctgagtgacattcagccctgcctgcgggagggcgaggacaagccgtgctccggccgtggggagtgccagtgcgggcactgtgtgtgctacggcgaaggccgctacgagggtcagttctgcgagtatgacaacttccagtgtccccgcacttccgggttcctctgcaatgaccgaggacgctgctccatgggccagtgtgtgtgtgagcctggttggacaggcccaagctgtgactgtcccctcagcaatgccacctgcatcgacagcaatgggggcatctgtaatggacgtggccactgtgagtgtggccgctgccactgccaccagcagtcgctctacacggacaccatctgcgagatcaactactcggcgatccacccgggcctctgcgaggacctacgctcctgcgtgcagtgccaggcgtggggcaccggcgagaagaaggggcgcacgtgtgaggaatgcaacttcaaggtcaagatggtggacgagcttaagagagccgaggaggtggtggtgcgctgctccttccgggacgaggatgacgactgcacctacagctacaccatggaaggtgacggcgcccctgggcccaacagcactgtcctggtgcacaagaagaaggactgccctccgggctccttctggtggctcatccccctgctcctcctcctcctgccgctcctggccctgctactgctgctatgctggaagtactgtgcctgctgcaaggcctgcctggcacttctcccgtgctgcaaccgaggtcacatggtgggctttaaggaagaccactacatgctgcgggagaacctgatggcctctgaccacttggacacgcccatgctgcgcagcgggaacctcaagggccgtgacgtggtccgctggaaggtcaccaacaacatgcagcggcctggctttgccactcatgccgccagcatcaaccccacagagctggtgccctacgggctgtccttgcgcctggcccgcctttgcaccgagaacctgctgaagcctgacactcgggagtgcgcccagctgcgccaggaggtggaggagaacctgaacgaggtctacaggcagatctccggtgtacacaagctccagcagaccaagttccggcagcagcccaatgccgggaaaaagcaagaccacaccattgtggacacagtgctgatggcgccccgctcggccaagccggccctgctgaagcttacagagaagcaggtggaacagagggccttccacgacctcaaggtggcccccggctactacaccctcactgcagaccaggacgcccggggcatggtggagttccaggagggcgtggagctggtggacgtacgggtgcccctctttatccggcctgaggatgacgacgagaagcagctgctggtggaggccatcgacgtgcccgcaggcactgccaccctcggccgccgcctggtaaacatcaccatcatcaaggagcaagccagagacgtggtgtcctttgagcagcctgagttctcggtcagccgcggggaccaggtggcccgcatccctgtcatccggcgtgtcctggacggcgggaagtcccaggtctcctaccgcacacaggatggcaccgcgcagggcaaccgggactacatccccgtggagggtgagctgctgttccagcctggggaggcctggaaagagctgcaggtgaagctcctggagctgcaagaagttgactccctcctgcggggccgccaggtccgccgtttccacgtccagctcagcaaccctaagtttggggcccacctgggccagccccactccaccaccatcatcatcagggacccagatgaactggaccggagcttcacgagtcagatgttgtcatcacagccaccccctcacggcgacctgggcgccccgcagaaccccaatgctaaggccgctgggtccaggaagatccatttcaactggctgcccccttctggcaagccaatggggtacagggtaaagtactggattcagggtgactccgaatccgaagcccacctgctcgacagcaaggtgccctcagtggagctcaccaacctgtacccgtattgcgactatgagatgaaggtgtgcgcctacggggctcagggcgagggaccctacagctccctggtgtcctgccgcacccaccaggaagtgcccagcgagccagggcgtctggccttcaatgtcgtctcctccacggtgacccagctgagctgggctgagccggctgagaccaacggtgagatcacagcctacgaggtctgctatggcctggtcaacgatgacaaccgacctattgggcccatgaagaaagtgctggttgacaaccctaagaaccggatgctgcttattgagaaccttcgggagtcccagccctaccgctacacggtgaaggcgcgcaacggggccggctgggggcctgagcgggaggccatcatcaacctggccacccagcccaagaggcccatgtccatccccatcatccctgacatccctatcgtggacgcccagagcggggaggactacgacagcttccttatgtacagcgatgacgttctacgctctccatcgggcagccagaggcccagcgtctccgatgacactgagcacctggtgaatggccggatggactttgccttcccgggcagcaccaactccctgcacaggatgaccacgaccagtgctgctgcctatggcacccacctgagcccacacgtgccccaccgcgtgctaagcacatcctccaccctcacacgggactacaactcactgacccgctcagaacactcacactcgaccacactgccgagggactactccaccctcacctccgtctcctcccacgactctcgcctgactgctggtgtgcccgacacgcccacccgcctggtgttctctgccctggggcccacatctctcagagtgagctggcaggagccgcggtgcgagcggccgctgcagggctacagtgtggagtaccagctgctgaacggcggtgagctgcatcggctcaacatccccaaccctgcccagacctcggtggtggtggaagacctcctgcccaaccactcctacgtgttccgcgtgcgggcccagagccaggaaggctggggccgagagcgtgagggtgtcatcaccattgaatcccaggtgcacccgcagagcccactgtgtcccctgccaggctccgccttcactttgagcactcccagtgccccaggcccgctggtgttcactgccctgagcccagactcgctgcagctgagctgggagcggccacggaggcccaatggggatatcgtcggctacctggtgacctgtgagatggcccaaggaggagggccagccaccgcattccgggtggatggagacagccccgagagccggctgaccgtgccgggcctcagcgagaacgtgccctacaagttcaaggtgcaggccaggaccactgagggcttcgggccagagcgcgagggcatcatcaccatagagtcccaggatggaggacccttcccgcagctgggcagccgtgccgggctcttccagcacccgctgcaaagcgagtacagcagcatcaccaccacccacaccagcgccaccgagcccttcctagtggatgggctgaccctgggggcccagcacctggaggcaggcggctccctcacccggcatgtgacccaggagtttgtgagccggacactgaccaccagcggaacccttagcacccacatggaccaacagttcttccaaacttgaccgcaccctgccccacccccgccacgtcccactaggcgtcctcccgactcctctcccggagcctcctcagctactccatccttgcacccctgggggcccagcccacccgcatgcacagagcaggggctaggtgtctcctgggaggcatgaagggggcaaggtccgtcctctgtgggcccaaacctatttgtaaccaaagagctgggagcagcacaaggacccagcctttgttctgcacttaataaatggttttgctactgcta

SEQ ID NO: 606 - DNA, 6017 bp, Homo sapiens
cgcccgcgcgctgcagccccatctcctagcggcagcccaggcgcggagggagcgagtccgccccgaggtaggtccaggacgggcgcacagcagcagccgaggctggccgggagagggaggaagaggatggcagggccacgccccagcccatgggccaggctgctcctggcagccttgatcagcgtcagcctctctgggaccttggcaaaccgctgcaagaaggccccagtgaagagctgcacggagtgtgtccgtgtggataaggactgcgcctactgcacagacgagatgttcagggaccggcgctgcaacacccaggcggagctgctggccgcgggctgccagcgggagagcatcgtggtcatggagagcagcttccaaatcacagaggagacccagattgacaccaccctgcggcgcagccagatgtccccccaaggcctgcgggtccgtctgcggcccggtgaggagcggcattttgagctggaggtgtttgagccactggagagccccgtggacctgtacatcctcatggacttctccaactccatgtccgatgatctggacaacctcaagaagatggggcagaacctggctcgggtcctgagccagctcaccagcgactacactattggatttggcaagtttgtggacaaagtcagcgtcccgcagacggacatgaggcctgagaagctgaaggagccctggcccaacagtgacccccccttctccttcaagaacgtcatcagcctgacagaagatgtggatgagttccggaataaactgcagggagagcggatctcaggcaacctggatgctcctgagggcggcttcgatgccatcctgcagacagctgtgtgcacgagggacattggctggcgcccggacagcacccacctgctggtcttctccaccgagtcagccttccactatgaggctgatggcgccaacgtgctggctggcatcatgagccgcaacgatgaacggtgccacctggacaccacgggcacctacacccagtacaggacacaggactacccgtcggtgcccaccctggtgcgcctgctcgccaagcacaacatcatccccatctttgctgtcaccaactactcctatagctactacgagaagcttcacacctatttccctgtctcctcactgggggtgctgcaggaggactcgtccaacatcgtggagctgctggaggaggccttcaatcggatccgctccaacctggacatccgggccctagacagcccccgaggccttcggacagaggtcacctccaagatgttccagaagacgaggactgggtcctttcacatccggcggggggaagtgggtatataccaggtgcagctgcgggcccttgagcacgtggatgggacgcacgtgtgccagctgccggaggaccagaagggcaacatccatctgaaaccttccttctccgacggcctcaagatggacgcgggcatcatctgtgatgtgtgcacctgcgagctgcaaaaagaggtgcggtcagctcgctgcagcttcaacggagacttcgtgtgcggacagtgtgtgtgcagcgagggctggagtggccagacctgcaactgctccaccggctctctgagtgacattcagccctgcctgcgggagggcgaggacaagccgtgctccggccgtggggagtgccagtgcgggcactgtgtgtgctacggcgaaggccgctacgagggtcagttctgcgagtatgacaacttccagtgtccccgcacttccgggttcctctgcaatgaccgaggacgctgctccatgggccagtgtgtgtgtgagcctggttggacaggcccaagctgtgactgtcccctcagcaatgccacctgcatcgacagcaatgggggcatctgtaatggacgtggccactgtgagtgtggccgctgccactgccaccagcagtcgctctacacggacaccatctgcgagatcaactactcggcgatccacccgggcctctgcgaggacctacgctcctgcgtgcagtgccaggcgtggggcaccggcgagaagaaggggcgcacgtgtgaggaatgcaacttcaaggtcaagatggtggacgagcttaagagagccgaggaggtggtggtgcgctgctccttccgggacgaggatgacgactgcacctacagctacaccatggaaggtgacggcgcccctgggcccaacagcactgtcctggtgcacaagaagaaggactgccctccgggctccttctggtggctcatccccctgctcctcctcctcctgccgctcctggccctgctactgctgctatgctggaagtactgtgcctgctgcaaggcctgcctggcacttctcccgtgctgcaaccgaggtcacatggtgggctttaaggaagaccactacatgctgcgggagaacctgatggcctctgaccacttggacacgcccatgctgcgcagcgggaacctcaagggccgtgacgtggtccgctggaaggtcaccaacaacatgcagcggcctggctttgccactcatgccgccagcatcaaccccacagagctggtgccctacgggctgtccttgcgcctggcccgcctttgcaccgagaacctgctgaagcctgacactcgggagtgcgcccagctgcgccaggaggtggaggagaacctgaacgaggtctacaggcagatctccggtgtacacaagctccagcagaccaagttccggcagcagcccaatgccgggaaaaagcaagaccacaccattgtggacacagtgctgatggcgccccgctcggccaagccggccctgctgaagcttacagagaagcaggtggaacagagggccttccacgacctcaaggtggcccccggctactacaccctcactgcagaccaggacgcccggggcatggtggagttccaggagggcgtggagctggtggacgtacgggtgcccctctttatccggcctgaggatgacgacgagaagcagctgctggtggaggccatcgacgtgcccgcaggcactgccaccctcggccgccgcctggtaaacatcaccatcatcaaggagcaagccagagacgtggtgtcctttgagcagcctgagttctcggtcagccgcggggaccaggtggcccgcatccctgtcatccggcgtgtcctggacggcgggaagtcccaggtctcctaccgcacacaggatggcaccgcgcagggcaaccgggactacatccccgtggagggtgagctgctgttccagcctggggaggcctggaaagagctgcaggtgaagctcctggagctgcaagaagttgactccctcctgcggggccgccaggtccgccgtttccacgtccagctcagcaaccctaagtttggggcccacctgggccagccccactccaccaccatcatcatcagggacccagatgaactggaccggagcttcacgagtcagatgttgtcatcacagccaccccctcacggcgacctgggcgccccgcagaaccccaatgctaaggccgctgggtccaggaagatccatttcaactggctgcccccttctggcaagccaatggggtacagggtaaagtactggattcagggtgactccgaatccgaagcccacctgctcgacagcaaggtgccctcagtggagctcaccaacctgtacccgtattgcgactatgagatgaaggtgtgcgcctacggggctcagggcgagggaccctacagctccctggtgtcctgccgcacccaccaggaagtgcccagcgagccagggcgtctggccttcaatgtcgtctcctccacggtgacccagctgagctgggctgagccggctgagaccaacggtgagatcacagcctacgaggtctgctatggcctggtcaacgatgacaaccgacctattgggcccatgaagaaagtgctggttgacaaccctaagaaccggatgctgcttattgagaaccttcgggagtcccagccctaccgctacacggtgaaggcgcgcaacggggccggctgggggcctgagcgggaggccatcatcaacctggccacccagcccaagaggcccatgtccatccccatcatccctgacatccctatcgtggacgcccagagcggggaggactacgacagcttccttatgtacagcgatgacgttctacgctctccatcgggcagccagaggcccagcgtctccgatgacactggctgcggctggaagttcgagcccctgctgggggaggagctggacctgcggcgcgtcacgtggcggctgcccccggagctcatcccgcgcctgtcggccagcagcgggcgctcctccgacgccgaggcgccccacgggcccccggacgacggcggcgcgggcgggaagggcggcagcctgccccgcagtgcgacacccgggccccccggagagcacctggtgaatggccggatggactttgccttcccgggcagcaccaactccctgcacaggatgaccacgaccagtgctgctgcctatggcacccacctgagcccacacgtgccccaccgcgtgctaagcacatcctccaccctcacacgggactacaactcactgacccgctcagaacactcacactcgaccacactgccgagggactactccaccctcacctccgtctcctcccacggcctccctcccatctgggaacacgggaggagcaggcttccgctgtcctgggccctggggtcccggagtcgggctcagatgaaagggttccccccttccaggggcccacgagactctataatcctggctgggaggccagcagcgccctcctggggcccagactctcgcctgactgctggtgtgcccgacacgcccacccgcctggtgttctctgccctggggcccacatctctcagagtgagctggcaggagccgcggtgcgagcggccgctgcagggctacagtgtggagtaccagctgctgaacggcggtgagctgcatcggctcaacatccccaaccctgcccagacctcggtggtggtggaagacctcctgcccaaccactcctacgtgttccgcgtgcgggcccagagccaggaaggctggggccgagagcgtgagggtgtcatcaccattgaatcccaggtgcacccgcagagcccactgtgtcccctgccaggctccgccttcactttgagcactcccagtgccccaggcccgctggtgttcactgccctgagcccagactcgctgcagctgagctgggagcggccacggaggcccaatggggatatcgtcggctacctggtgacctgtgagatggcccaaggaggagggccagccaccgcattccgggtggatggagacagccccgagagccggctgaccgtgccgggcctcagcgagaacgtgccctacaagttcaaggtgcaggccaggaccactgagggcttcgggccagagcgcgagggcatcatcaccatagagtcccaggatggaggacccttcccgcagctgggcagccgtgccgggctcttccagcacccgctgcaaagcgagtacagcagcatcaccaccacccacaccagcgccaccgagcccttcctagtggatgggctgaccctgggggcccagcacctggaggcaggcggctccctcacccggcatgtgacccaggagtttgtgagccggacactgaccaccagcggaacccttagcacccacatggaccaacagttcttccaaacttgaccgcaccctgccccacccccgccacgtcccactaggcgtcctcccgactcctctcccggagcctcctcagctactccatccttgcacccctgggggcccagcccacccgcatgcacagagcaggggctaggtgtctcctgggaggcatgaagggggcaaggtccgtcctctgtgggcccaaacctatttgtaaccaaagagctgggagcagcacaaggacccagcctttgttctgcacttaataaatggttttgctactgcta

SEQ ID NO: 607 - DNA, 5988 bp, Homo sapiens
gccctcggacagtccctgctcgcccgcgcgctgcagccccatctcctagcggcagcccaggcgcggagggagcgagtccgccccgaggaggaagaggatggcagggccacgccccagcccatgggccaggctgctcctggcagccttgatcagcgtcagcctctctgggaccttggcaaaccgctgcaagaaggccccagtgaagagctgcacggagtgtgtccgtgtggataaggactgcgcctactgcacagacgagatgttcagggaccggcgctgcaacacccaggcggagctgctggccgcgggctgccagcgggagagcatcgtggtcatggagagcagcttccaaatcacagaggagacccagattgacaccaccctgcggcgcagccagatgtccccccaaggcctgcgggtccgtctgcggcccggtgaggagcggcattttgagctggaggtgtttgagccactggagagccccgtggacctgtacatcctcatggacttctccaactccatgtccgatgatctggacaacctcaagaagatggggcagaacctggctcgggtcctgagccagctcaccagcgactacactattggatttggcaagtttgtggacaaagtcagcgtcccgcagacggacatgaggcctgagaagctgaaggagccctggcccaacagtgacccccccttctccttcaagaacgtcatcagcctgacagaagatgtggatgagttccggaataaactgcagggagagcggatctcaggcaacctggatgctcctgagggcggcttcgatgccatcctgcagacagctgtgtgcacgagggacattggctggcgcccggacagcacccacctgctggtcttctccaccgagtcagccttccactatgaggctgatggcgccaacgtgctggctggcatcatgagccgcaacgatgaacggtgccacctggacaccacgggcacctacacccagtacaggacacaggactacccgtcggtgcccaccctggtgcgcctgctcgccaagcacaacatcatccccatctttgctgtcaccaactactcctatagctactacgagaagcttcacacctatttccctgtctcctcactgggggtgctgcaggaggactcgtccaacatcgtggagctgctggaggaggccttcaatcggatccgctccaacctggacatccgggccctagacagcccccgaggccttcggacagaggtcacctccaagatgttccagaagacgaggactgggtcctttcacatccggcggggggaagtgggtatataccaggtgcagctgcgggcccttgagcacgtggatgggacgcacgtgtgccagctgccggaggaccagaagggcaacatccatctgaaaccttccttctccgacggcctcaagatggacgcgggcatcatctgtgatgtgtgcacctgcgagctgcaaaaagaggtgcggtcagctcgctgcagcttcaacggagacttcgtgtgcggacagtgtgtgtgcagcgagggctggagtggccagacctgcaactgctccaccggctctctgagtgacattcagccctgcctgcgggagggcgaggacaagccgtgctccggccgtggggagtgccagtgcgggcactgtgtgtgctacggcgaaggccgctacgagggtcagttctgcgagtatgacaacttccagtgtccccgcacttccgggttcctctgcaatgaccgaggacgctgctccatgggccagtgtgtgtgtgagcctggttggacaggcccaagctgtgactgtcccctcagcaatgccacctgcatcgacagcaatgggggcatctgtaatggacgtggccactgtgagtgtggccgctgccactgccaccagcagtcgctctacacggacaccatctgcgagatcaactactcggcgatccacccgggcctctgcgaggacctacgctcctgcgtgcagtgccaggcgtggggcaccggcgagaagaaggggcgcacgtgtgaggaatgcaacttcaaggtcaagatggtggacgagcttaagagagccgaggaggtggtggtgcgctgctccttccgggacgaggatgacgactgcacctacagctacaccatggaaggtgacggcgcccctgggcccaacagcactgtcctggtgcacaagaagaaggactgccctccgggctccttctggtggctcatccccctgctcctcctcctcctgccgctcctggccctgctactgctgctatgctggaagtactgtgcctgctgcaaggcctgcctggcacttctcccgtgctgcaaccgaggtcacatggtgggctttaaggaagaccactacatgctgcgggagaacctgatggcctctgaccacttggacacgcccatgctgcgcagcgggaacctcaagggccgtgacgtggtccgctggaaggtcaccaacaacatgcagcggcctggctttgccactcatgccgccagcatcaaccccacagagctggtgccctacgggctgtccttgcgcctggcccgcctttgcaccgagaacctgctgaagcctgacactcgggagtgcgcccagctgcgccaggaggtggaggagaacctgaacgaggtctacaggcagatctccggtgtacacaagctccagcagaccaagttccggcagcagcccaatgccgggaaaaagcaagaccacaccattgtggacacagtgctgatggcgccccgctcggccaagccggccctgctgaagcttacagagaagcaggtggaacagagggccttccacgacctcaaggtggcccccggctactacaccctcactgcagaccaggacgcccggggcatggtggagttccaggagggcgtggagctggtggacgtacgggtgcccctctttatccggcctgaggatgacgacgagaagcagctgctggtggaggccatcgacgtgcccgcaggcactgccaccctcggccgccgcctggtaaacatcaccatcatcaaggagcaagccagagacgtggtgtcctttgagcagcctgagttctcggtcagccgcggggaccaggtggcccgcatccctgtcatccggcgtgtcctggacggcgggaagtcccaggtctcctaccgcacacaggatggcaccgcgcagggcaaccgggactacatccccgtggagggtgagctgctgttccagcctggggaggcctggaaagagctgcaggtgaagctcctggagctgcaagaagttgactccctcctgcggggccgccaggtccgccgtttccacgtccagctcagcaaccctaagtttggggcccacctgggccagccccactccaccaccatcatcatcagggacccagatgaactggaccggagcttcacgagtcagatgttgtcatcacagccaccccctcacggcgacctgggcgccccgcagaaccccaatgctaaggccgctgggtccaggaagatccatttcaactggctgcccccttctggcaagccaatggggtacagggtaaagtactggattcagggtgactccgaatccgaagcccacctgctcgacagcaaggtgccctcagtggagctcaccaacctgtacccgtattgcgactatgagatgaaggtgtgcgcctacggggctcagggcgagggaccctacagctccctggtgtcctgccgcacccaccaggaagtgcccagcgagccagggcgtctggccttcaatgtcgtctcctccacggtgacccagctgagctgggctgagccggctgagaccaacggtgagatcacagcctacgaggtctgctatggcctggtcaacgatgacaaccgacctattgggcccatgaagaaagtgctggttgacaaccctaagaaccggatgctgcttattgagaaccttcgggagtcccagccctaccgctacacggtgaaggcgcgcaacggggccggctgggggcctgagcgggaggccatcatcaacctggccacccagcccaagaggcccatgtccatccccatcatccctgacatccctatcgtggacgcccagagcggggaggactacgacagcttccttatgtacagcgatgacgttctacgctctccatcgggcagccagaggcccagcgtctccgatgacactggctgcggctggaagttcgagcccctgctgggggaggagctggacctgcggcgcgtcacgtggcggctgcccccggagctcatcccgcgcctgtcggccagcagcgggcgctcctccgacgccgaggcgccccacgggcccccggacgacggcggcgcgggcgggaagggcggcagcctgccccgcagtgcgacacccgggccccccggagagcacctggtgaatggccggatggactttgccttcccgggcagcaccaactccctgcacaggatgaccacgaccagtgctgctgcctatggcacccacctgagcccacacgtgccccaccgcgtgctaagcacatcctccaccctcacacgggactacaactcactgacccgctcagaacactcacactcgaccacactgccgagggactactccaccctcacctccgtctcctcccacggcctccctcccatctgggaacacgggaggagcaggcttccgctgtcctgggccctggggtcccggagtcgggctcagatgaaagggttccccccttccaggggcccacgagactctataatcctggctgggaggccagcagcgccctcctggggcccagactctcgcctgactgctggtgtgcccgacacgcccacccgcctggtgttctctgccctggggcccacatctctcagagtgagctggcaggagccgcggtgcgagcggccgctgcagggctacagtgtggagtaccagctgctgaacggcggtgagctgcatcggctcaacatccccaaccctgcccagacctcggtggtggtggaagacctcctgcccaaccactcctacgtgttccgcgtgcgggcccagagccaggaaggctggggccgagagcgtgagggtgtcatcaccattgaatcccaggtgcacccgcagagcccactgtgtcccctgccaggctccgccttcactttgagcactcccagtgccccaggcccgctggtgttcactgccctgagcccagactcgctgcagctgagctgggagcggccacggaggcccaatggggatatcgtcggctacctggtgacctgtgagatggcccaaggaggagggccagccaccgcattccgggtggatggagacagccccgagagccggctgaccgtgccgggcctcagcgagaacgtgccctacaagttcaaggtgcaggccaggaccactgagggcttcgggccagagcgcgagggcatcatcaccatagagtcccaggatggaggacccttcccgcagctgggcagccgtgccgggctcttccagcacccgctgcaaagcgagtacagcagcatcaccaccacccacaccagcgccaccgagcccttcctagtggatgggctgaccctgggggcccagcacctggaggcaggcggctccctcacccggcatgtgacccaggagtttgtgagccggacactgaccaccagcggaacccttagcacccacatggaccaacagttcttccaaacttgaccgcaccctgccccacccccgccacgtcccactaggcgtcctcccgactcctctcccggagcctcctcagctactccatccttgcacccctgggggcccagcccacccgcatgcacagagcaggggctaggtgtctcctgggaggcatgaagggggcaaggtccgtcctctgtgggcccaaacctatttgtaaccaaagagctgggagcagcacaaggacccagcctttgttctgcacttaataaatggttttgctactgcta

SEQ ID NO: 608 - DNA, 5469 bp, Homo sapiens
gccctcggacagtccctgctcgcccgcgcgctgcagccccatctcctagcggcagcccaggcgcggagggagcgagtccgccccgaggaggaagaggatggcagggccacgccccagcccatgggccaggctgctcctggcagccttgatcagcgtcagcctctctgggaccttggcaaaccgctgcaagaaggccccagtgaagagctgcacggagtgtgtccgtgtggataaggactgcgcctactgcacagacgagatgttcagggaccggcgctgcaacacccaggcggagctgctggccgcgggctgccagcgggagagcatcgtggtcatggagagcagcttccaaatcacagaggagacccagattgacaccaccctgcggcgcagccagatgtccccccaaggcctgcgggtccgtctgcggcccggtgaggagcggcattttgagctggaggtgtttgagccactggagagccccgtggacctgtacatcctcatggacttctccaactccatgtccgatgatctggacaacctcaagaagatggggcagaacctggctcgggtcctgagccagctcaccagcgactacactattggatttggcaagtttgtggacaaagtcagcgtcccgcagacggacatgaggcctgagaagctgaaggagccctggcccaacagtgacccccccttctccttcaagaacgtcatcagcctgacagaagatgtggatgagttccggaataaactgcagggagagcggatctcaggcaacctggatgctcctgagggcggcttcgatgccatcctgcagacagctgtgtgcacgagggacattggctggcgcccggacagcacccacctgctggtcttctccaccgagtcagccttccactatgaggctgatggcgccaacgtgctggctggcatcatgagccgcaacgatgaacggtgccacctggacaccacgggcacctacacccagtacaggacacaggactacccgtcggtgcccaccctggtgcgcctgctcgccaagcacaacatcatccccatctttgctgtcaccaactactcctatagctactacgagaagcttcacacctatttccctgtctcctcactgggggtgctgcaggaggactcgtccaacatcgtggagctgctggaggaggccttcaatcggatccgctccaacctggacatccgggccctagacagcccccgaggccttcggacagaggtcacctccaagatgttccagaagacgaggactgggtcctttcacatccggcggggggaagtgggtatataccaggtgcagctgcgggcccttgagcacgtggatgggacgcacgtgtgccagctgccggaggaccagaagggcaacatccatctgaaaccttccttctccgacggcctcaagatggacgcgggcatcatctgtgatgtgtgcacctgcgagctgcaaaaagaggtgcggtcagctcgctgcagcttcaacggagacttcgtgtgcggacagtgtgtgtgcagcgagggctggagtggccagacctgcaactgctccaccggctctctgagtgacattcagccctgcctgcgggagggcgaggacaagccgtgctccggccgtggggagtgccagtgcgggcactgtgtgtgctacggcgaaggccgctacgagggtcagttctgcgagtatgacaacttccagtgtccccgcacttccgggttcctctgcaatgaccgaggacgctgctccatgggccagtgtgtgtgtgagcctggttggacaggcccaagctgtgactgtcccctcagcaatgccacctgcatcgacagcaatgggggcatctgtaatggacgtggccactgtgagtgtggccgctgccactgccaccagcagtcgctctacacggacaccatctgcgagatcaactactcggcgatccacccgggcctctgcgaggacctacgctcctgcgtgcagtgccaggcgtggggcaccggcgagaagaaggggcgcacgtgtgaggaatgcaacttcaaggtcaagatggtggacgagcttaagagagccgaggaggtggtggtgcgctgctccttccgggacgaggatgacgactgcacctacagctacaccatggaaggtgacggcgcccctgggcccaacagcactgtcctggtgcacaagaagaaggactgccctccgggctccttctggtggctcatccccctgctcctcctcctcctgccgctcctggccctgctactgctgctatgctggaagtactgtgcctgctgcaaggcctgcctggcacttctcccgtgctgcaaccgaggtcacatggtgggctttaaggaagaccactacatgctgcgggagaacctgatggcctctgaccacttggacacgcccatgctgcgcagcgggaacctcaagggccgtgacgtggtccgctggaaggtcaccaacaacatgcagcggcctggctttgccactcatgccgccagcatcaaccccacagagctggtgccctacgggctgtccttgcgcctggcccgcctttgcaccgagaacctgctgaagcctgacactcgggagtgcgcccagctgcgccaggaggtggaggagaacctgaacgaggtctacaggcagatctccggtgtacacaagctccagcagaccaagttccggcagcagcccaatgccgggaaaaagcaagaccacaccattgtggacacagtgctgatggcgccccgctcggccaagccggccctgctgaagcttacagagaagcaggtggaacagagggccttccacgacctcaaggtggcccccggctactacaccctcactgcagaccaggacgcccggggcatggtggagttccaggagggcgtggagctggtggacgtacgggtgcccctctttatccggcctgaggatgacgacgagaagcagctgctggtggaggccatcgacgtgcccgcaggcactgccaccctcggccgccgcctggtaaacatcaccatcatcaaggagcaagccagagacgtggtgtcctttgagcagcctgagttctcggtcagccgcggggaccaggtggcccgcatccctgtcatccggcgtgtcctggacggcgggaagtcccaggtctcctaccgcacacaggatggcaccgcgcagggcaaccgggactacatccccgtggagggtgagctgctgttccagcctggggaggcctggaaagagctgcaggtgaagctcctggagctgcaagaagttgactccctcctgcggggccgccaggtccgccgtttccacgtccagctcagcaaccctaagtttggggcccacctgggccagccccactccaccaccatcatcatcagggacccagatgaactggaccggagcttcacgagtcagatgttgtcatcacagccaccccctcacggcgacctgggcgccccgcagaaccccaatgctaaggccgctgggtccaggaagatccatttcaactggctgcccccttctggcaagccaatggggtacagggtaaagtactggattcagggtgactccgaatccgaagcccacctgctcgacagcaaggtgccctcagtggagctcaccaacctgtacccgtattgcgactatgagatgaaggtgtgcgcctacggggctcagggcgagggaccctacagctccctggtgtcctgccgcacccaccaggaagtgcccagcgagccagggcgtctggccttcaatgtcgtctcctccacggtgacccagctgagctgggctgagccggctgagaccaacggtgagatcacagcctacgaggtctgctatggcctggtcaacgatgacaaccgacctattgggcccatgaagaaagtgctggttgacaaccctaagaaccggatgctgcttattgagaaccttcgggagtcccagccctaccgctacacggtgaaggcgcgcaacggggccggctgggggcctgagcgggaggccatcatcaacctggccacccagcccaagaggcccatgtccatccccatcatccctgacatccctatcgtggacgcccagagcggggaggactacgacagcttccttatgtacagcgatgacgttctacgctctccatcgggcagccagaggcccagcgtctccgatgacactgagcacctggtgaatggccggatggactttgccttcccgggcagcaccaactccctgcacaggatgaccacgaccagtgctgctgcctatggcacccacctgagcccacacgtgccccaccgcgtgctaagcacatcctccaccctcacacgggactacaactcactgacccgctcagaacactcacactcgaccacactgccgagggactactccaccctcacctccgtctcctcccacggtgagctgcatcggctcaacatccccaaccctgcccagacctcggtggtggtggaagacctcctgcccaaccactcctacgtgttccgcgtgcgggcccagagccaggaaggctggggccgagagcgtgagggtgtcatcaccattgaatcccaggtgcacccgcagagcccactgtgtcccctgccaggctccgccttcactttgagcactcccagtgccccaggcccgctggtgttcactgccctgagcccagactcgctgcagctgagctgggagcggccacggaggcccaatggggatatcgtcggctacctggtgacctgtgagatggcccaaggaggagggccagccaccgcattccgggtggatggagacagccccgagagccggctgaccgtgccgggcctcagcgagaacgtgccctacaagttcaaggtgcaggccaggaccactgagggcttcgggccagagcgcgagggcatcatcaccatagagtcccaggatggaggacccttcccgcagctgggcagccgtgccgggctcttccagcacccgctgcaaagcgagtacagcagcatcaccaccacccacaccagcgccaccgagcccttcctagtggatgggctgaccctgggggcccagcacctggaggcaggcggctccctcacccggcatgtgacccaggagtttgtgagccggacactgaccaccagcggaacccttagcacccacatggaccaacagttcttccaaacttgaccgcaccctgccccacccccgccacgtcccactaggcgtcctcccgactcctctcccggagcctcctcagctactccatccttgcacccctgggggcccagcccacccgcatgcacagagcaggggctaggtgtctcctgggaggcatgaagggggcaaggtccgtcctctgtgggcccaaacctatttgtaaccaaagagctgggagcagcacaaggacccagcctttgttctgcacttaataaatggttttgctactgcta

SEQ ID NO: 609 - DNA, 5778 bp, Homo sapiens
gccctcggacagtccctgctcgcccgcgcgctgcagccccatctcctagcggcagcccaggcgcggagggagcgagtccgccccgaggaggaagaggatggcagggccacgccccagcccatgggccaggctgctcctggcagccttgatcagcgtcagcctctctgggaccttggcaaaccgctgcaagaaggccccagtgaagagctgcacggagtgtgtccgtgtggataaggactgcgcctactgcacagacgagatgttcagggaccggcgctgcaacacccaggcggagctgctggccgcgggctgccagcgggagagcatcgtggtcatggagagcagcttccaaatcacagaggagacccagattgacaccaccctgcggcgcagccagatgtccccccaaggcctgcgggtccgtctgcggcccggtgaggagcggcattttgagctggaggtgtttgagccactggagagccccgtggacctgtacatcctcatggacttctccaactccatgtccgatgatctggacaacctcaagaagatggggcagaacctggctcgggtcctgagccagctcaccagcgactacactattggatttggcaagtttgtggacaaagtcagcgtcccgcagacggacatgaggcctgagaagctgaaggagccctggcccaacagtgacccccccttctccttcaagaacgtcatcagcctgacagaagatgtggatgagttccggaataaactgcagggagagcggatctcaggcaacctggatgctcctgagggcggcttcgatgccatcctgcagacagctgtgtgcacgagggacattggctggcgcccggacagcacccacctgctggtcttctccaccgagtcagccttccactatgaggctgatggcgccaacgtgctggctggcatcatgagccgcaacgatgaacggtgccacctggacaccacgggcacctacacccagtacaggacacaggactacccgtcggtgcccaccctggtgcgcctgctcgccaagcacaacatcatccccatctttgctgtcaccaactactcctatagctactacgagaagcttcacacctatttccctgtctcctcactgggggtgctgcaggaggactcgtccaacatcgtggagctgctggaggaggccttcaatcggatccgctccaacctggacatccgggccctagacagcccccgaggccttcggacagaggtcacctccaagatgttccagaagacgaggactgggtcctttcacatccggcggggggaagtgggtatataccaggtgcagctgcgggcccttgagcacgtggatgggacgcacgtgtgccagctgccggaggaccagaagggcaacatccatctgaaaccttccttctccgacggcctcaagatggacgcgggcatcatctgtgatgtgtgcacctgcgagctgcaaaaagaggtgcggtcagctcgctgcagcttcaacggagacttcgtgtgcggacagtgtgtgtgcagcgagggctggagtggccagacctgcaactgctccaccggctctctgagtgacattcagccctgcctgcgggagggcgaggacaagccgtgctccggccgtggggagtgccagtgcgggcactgtgtgtgctacggcgaaggccgctacgagggtcagttctgcgagtatgacaacttccagtgtccccgcacttccgggttcctctgcaatgaccgaggacgctgctccatgggccagtgtgtgtgtgagcctggttggacaggcccaagctgtgactgtcccctcagcaatgccacctgcatcgacagcaatgggggcatctgtaatggacgtggccactgtgagtgtggccgctgccactgccaccagcagtcgctctacacggacaccatctgcgagatcaactactcggcgatccacccgggcctctgcgaggacctacgctcctgcgtgcagtgccaggcgtggggcaccggcgagaagaaggggcgcacgtgtgaggaatgcaacttcaaggtcaagatggtggacgagcttaagagagccgaggaggtggtggtgcgctgctccttccgggacgaggatgacgactgcacctacagctacaccatggaaggtgacggcgcccctgggcccaacagcactgtcctggtgcacaagaagaaggactgccctccgggctccttctggtggctcatccccctgctcctcctcctcctgccgctcctggccctgctactgctgctatgctggaagtactgtgcctgctgcaaggcctgcctggcacttctcccgtgctgcaaccgaggtcacatggtgggctttaaggaagaccactacatgctgcgggagaacctgatggcctctgaccacttggacacgcccatgctgcgcagcgggaacctcaagggccgtgacgtggtccgctggaaggtcaccaacaacatgcagcggcctggctttgccactcatgccgccagcatcaaccccacagagctggtgccctacgggctgtccttgcgcctggcccgcctttgcaccgagaacctgctgaagcctgacactcgggagtgcgcccagctgcgccaggaggtggaggagaacctgaacgaggtctacaggcagatctccggtgtacacaagctccagcagaccaagttccggcagcagcccaatgccgggaaaaagcaagaccacaccattgtggacacagtgctgatggcgccccgctcggccaagccggccctgctgaagcttacagagaagcaggtggaacagagggccttccacgacctcaaggtggcccccggctactacaccctcactgcagaccaggacgcccggggcatggtggagttccaggagggcgtggagctggtggacgtacgggtgcccctctttatccggcctgaggatgacgacgagaagcagctgctggtggaggccatcgacgtgcccgcaggcactgccaccctcggccgccgcctggtaaacatcaccatcatcaaggagcaagccagagacgtggtgtcctttgagcagcctgagttctcggtcagccgcggggaccaggtggcccgcatccctgtcatccggcgtgtcctggacggcgggaagtcccaggtctcctaccgcacacaggatggcaccgcgcagggcaaccgggactacatccccgtggagggtgagctgctgttccagcctggggaggcctggaaagagctgcaggtgaagctcctggagctgcaagaagttgactccctcctgcggggccgccaggtccgccgtttccacgtccagctcagcaaccctaagtttggggcccacctgggccagccccactccaccaccatcatcatcagggacccagatgaactggaccggagcttcacgagtcagatgttgtcatcacagccaccccctcacggcgacctgggcgccccgcagaaccccaatgctaaggccgctgggtccaggaagatccatttcaactggctgcccccttctggcaagccaatggggtacagggtaaagtactggattcagggtgactccgaatccgaagcccacctgctcgacagcaaggtgccctcagtggagctcaccaacctgtacccgtattgcgactatgagatgaaggtgtgcgcctacggggctcagggcgagggaccctacagctccctggtgtcctgccgcacccaccaggaagtgcccagcgagccagggcgtctggccttcaatgtcgtctcctccacggtgacccagctgagctgggctgagccggctgagaccaacggtgagatcacagcctacgaggtctgctatggcctggtcaacgatgacaaccgacctattgggcccatgaagaaagtgctggttgacaaccctaagaaccggatgctgcttattgagaaccttcgggagtcccagccctaccgctacacggtgaaggcgcgcaacggggccggctgggggcctgagcgggaggccatcatcaacctggccacccagcccaagaggcccatgtccatccccatcatccctgacatccctatcgtggacgcccagagcggggaggactacgacagcttccttatgtacagcgatgacgttctacgctctccatcgggcagccagaggcccagcgtctccgatgacactgagcacctggtgaatggccggatggactttgccttcccgggcagcaccaactccctgcacaggatgaccacgaccagtgctgctgcctatggcacccacctgagcccacacgtgccccaccgcgtgctaagcacatcctccaccctcacacgggactacaactcactgacccgctcagaacactcacactcgaccacactgccgagggactactccaccctcacctccgtctcctcccacggcctccctcccatctgggaacacgggaggagcaggcttccgctgtcctgggccctggggtcccggagtcgggctcagatgaaagggttccccccttccaggggcccacgagactctataatcctggctgggaggccagcagcgccctcctggggcccagactctcgcctgactgctggtgtgcccgacacgcccacccgcctggtgttctctgccctggggcccacatctctcagagtgagctggcaggagccgcggtgcgagcggccgctgcagggctacagtgtggagtaccagctgctgaacggcggtgagctgcatcggctcaacatccccaaccctgcccagacctcggtggtggtggaagacctcctgcccaaccactcctacgtgttccgcgtgcgggcccagagccaggaaggctggggccgagagcgtgagggtgtcatcaccattgaatcccaggtgcacccgcagagcccactgtgtcccctgccaggctccgccttcactttgagcactcccagtgccccaggcccgctggtgttcactgccctgagcccagactcgctgcagctgagctgggagcggccacggaggcccaatggggatatcgtcggctacctggtgacctgtgagatggcccaaggaggagggccagccaccgcattccgggtggatggagacagccccgagagccggctgaccgtgccgggcctcagcgagaacgtgccctacaagttcaaggtgcaggccaggaccactgagggcttcgggccagagcgcgagggcatcatcaccatagagtcccaggatggaggacccttcccgcagctgggcagccgtgccgggctcttccagcacccgctgcaaagcgagtacagcagcatcaccaccacccacaccagcgccaccgagcccttcctagtggatgggctgaccctgggggcccagcacctggaggcaggcggctccctcacccggcatgtgacccaggagtttgtgagccggacactgaccaccagcggaacccttagcacccacatggaccaacagttcttccaaacttgaccgcaccctgccccacccccgccacgtcccactaggcgtcctcccgactcctctcccggagcctcctcagctactccatccttgcacccctgggggcccagcccacccgcatgcacagagcaggggctaggtgtctcctgggaggcatgaagggggcaaggtccgtcctctgtgggcccaaacctatttgtaaccaaagagctgggagcagcacaaggacccagcctttgttctgcacttaataaatggttttgctactgcta

SEQ ID NO: 610 - DNA, 3072 bp, Homo sapiens
gggaggctggggatggcgcgtggcccctttaagacgcaccggggcgggcccgggcggcgcgcggcccctttaaggcttggcctacgtggcagccgctggagccgcagccgacgcggagcgaggccggccgccgggcacttcctgtggaggccgcagcgggtgcgggcgccgacgggcgagagccagcgagcgagcgagcgagccgagccgagcctcccgccgtcgccatgggccagaacgacctgatgggcacggccgaggacttcgccgaccagttcctccgtgtcacaaagcagtacctgccccacgtggcgcgcctctgtctgatcagcaccttcctggaggacggcatccgtatgtggttccagtggagcgagcagcgcgactacatcgacaccacctggaactgcggctacctgctggcctcgtccttcgtcttcctcaacttgctgggacagctgactggctgcgtcctggtgttgagcaggaacttcgtgcagtacgcctgcttcgggctctttggaatcatagctctgcagacgattgcctacagcattttatgggacttgaagtttttgatgaggaacctggccctgggaggaggcctgttgctgctcctagcagaatcccgttctgaagggaagagcatgtttgcgggcgtccccaccatgcgtgagagctcccccaaacagtacatgcagctcggaggcagggtcttgctggttctgatgttcatgaccctccttcactttgacgccagcttcttttctattgtccagaacatcgtgggcacagctctgatgattttagtggccattggttttaaaaccaagctggctgctttgactcttgttgtgtggctctttgccatcaacgtatatttcaacgccttctggaccattccagtctacaagcccatgcatgacttcctgaaatacgacttcttccagaccatgtcggtgattgggggcttgctcctggtggtggccctgggccctgggggtgtctccatggatgagaagaagaaggagtggtaacagtcacagatccctacctgcctggctaagacccgtggccgtcaaggactggttcggggtggattcaacaaaactgccagcttttatgtatcctcttcccttcccctcccttggtaaaggcacagatgttttgagaactttatttgcagagacacctgagaatcgatggctcagtctgctctggagccacagtctggcgtctgacccttcagtgcaggccagcctggcagctggaagcctcccccacgccgaggctttggagtgaacagcccgcttggctgtggcatctcagtcctatttttgagtttttttgtgggggtacaggagggggccttcaagctgtactgtgagcagacgcattggtattatcattcaaagcagtctccctcttatttgtaagtttacatttttagcggaaactactaaattattttgggtggttcagccaaacctcaaaacagttaatctccctggtttaaaatcacaccagtggctttgatgttgtttctgccccgcattgtattttataggaatagtgaaaacatttagggacacccaaagaatgatgcagtattaaaggggtggtagaagctgctgtttatgataaaagtcatcggtcagaaaatcagcttggattggtgccaagtgttttattgggtaacaccctgggagttttagtagcttgaggcaaggtggaggggcaagaagtccttggggaagctgctggtctgggtgctgctggcctccaagctggcagtgggaagggctagtgagaccacacaggggtagccccagcagcagcaccctgcaagccagcctggccagctgctcagaccagcttgcagagccgcagccgctgtgggcagggggtgtggcaggagctcccagcactggagacccacggactcaacccagttacctcacatggggccttttctgagcaaggtctcgaaagcgcaggccgccctggctgagcagcaccgccctttcccagctgcactcgccctgtggacagccccgacacaccactttcctgaggctgtcgctcactcagattgtccgtttgctatgccgaatgcagccaaaattcctttttacaatttgtgatgccttaccgatttgatcttaatcctgtatttaaagttttctaacactgccttatactgtgtttctctttttgggggagcttaactgcttgttgctccctgtcgtctgcaccatagtaaatgccacaagggtagtcgaacacctctctggcccctagacctatctggggacaggctggctcagcctgtctccagggctgctgcggcccagccccgagcctgcctccctcttggcctctcatccattggctctgcagggcaggggtgaggcaggtttctgctcataagtgcttttggaagtcacctacctttttaacacagccgaactagtcccaacgcgtttgcaaatattcccctggtagcctacttccttacccccgaatattggtaagatcgagcaatggcttcaggacatgggttctcttctcctgtgatcattcaagtgctcactgcatgaagactggcttgtctcagtgtttcaacctcaccagggctgtctcttggtccacacctcgctccctgttagtgccgtatgacagcccccatcaaatgaccttggccaagtcacggtttctctgtggtcaaggttggttggctgattggtggaaagtagggtggaccaaaggaggccacgtgagcagtcagcaccagttctgcaccagcagcgcctccgtcctagtgggtgttcctgtttctcctggccctgggtgggctagggcctgattcgggaagatgcctttgcagggaggggaggataagtgggatctaccaattgattctggcaaaacaatttctaagatttttttgctttatgtgggaaacagatctaaatctcattttatgctgtattttatatcttagttgtgtttgaaaacgttttgatttttggaaacacatcaaaataaataatggcgtttgttgtatgcagt

SEQ ID NO: 611 - DNA, 2975 bp, Homo sapiens
gggaggctggggatggcgcgtggcccctttaagacgcaccggggcgggcccgggcggcgcgcggcccctttaaggcttggcctacgtggcagccgctggagccgcagccgacgcggagcgaggccggccgccgggcacttcctgtggaggccgcagcgggtgcgggcgccgacgggcgagagccagcgagcgagcgagcgagccgagccgagcctcccgccgtcgccatgggccagaacgacctgatgggcacggccgaggacttcgccgaccagttcctccgtgtcacaaagcagtacctgccccacgtggcgcgcctctgtctgatcagcaccttcctggaggacggcatccgtatgtggttccagtggagcgagcagcgcgactacatcgacaccacctggaactgcggctacctgctggcctcgtccttcgtcttcctcaacttgctgggacagctgactggctgcgtcctggtgttgagcaggaacttcgtgcagtacgcctgcttcgggctctttggaatcatagctctgcagacgattgcctacagcattttatgggacttgaagtttttgatgaggaacctggccctgggaggaggcctgttgctgctcctagcagaatcccgttctgaagggaagagcatgtttgcgggcgtccccaccatgcgtgagagctcccccaaacagtacatgcagctcggaggcagggtcttgctggttctgatgttcatgaccctccttcactttgacgccagcttcttttctattgtccagaacatcgtgggcacagctctgatgattttagtggccattggttttaaaaccaagctggctgctttgactcttgttgtgtggctctttgccatcaacgtatatttcaacgccttctggaccattccagtctacaagcccatgcatgacttcctgaaatacgacttcttccagaccatgtcggtgattgggggcttgctcctggtggtggccctgggccctgggggtgtctccatggatgagaagaagaaggagtggtaacagtcacagatccctacctgcctggctaagacccgtggccgtcaaggactggttcggggtggattcaacaaaactgccagcttttatgtatcctcttcccttcccctcccttggtaaaggcacagatgttttgagaactttatttgcagagacacctgagaatcgatggctcagtctgctctggagccacagtctggcgtctgacccttcagtgcaggccagcctggcagctggaagcctcccccacgccgaggctttggagtgaacagcccgcttggctgtggcatctcagtcctatttttgagtttttttgtgggggtacaggagggggccttcaagctgtactgtgagcagacgcattggtattatcattcaaagcagtctccctcttatttgtaagtttacatttttagcggaaactactaaattattttgggtggttcagccaaacctcaaaacagttaatctccctggtttaaaatcacaccagtggctttgatgttgtttctgccccgcattgtattttataggaatagtgaaaacatttagggacacccaaagaatgatgcagtattaaaggggtggtagaagctgctgtttatgataaaagtcatcggtcagaaaatcagcttggattggtgccaagtgttttattgggtaacaccctgggagttttagtagcttgaggcaaggtggaggggcaagaagtctggcagtgggaagggctagtgagaccacacaggggtagccccagcagcagcaccctgcaagccagcctggccagctgctcagaccagcttgcagagccgcagccgctgtgggcagggggtgtggcaggagctcccagcactggagacccacggactcaacccagttacctcacatggggccttttctgagcaaggtctcgaaagcgcaggccgccctggctgagcagcaccgccctttcccagctgcactcgccctgtggacagccccgacacaccactttcctgaggctgtcgctcactcagattgtccgtttgctatgccgaatgcagccaaaattcctttttacaatttgtgatgccttaccgatttgatcttaatcctgtatttaaagttttctaacactgccttatactgtgtttctctttttgggggagcttaactgcttgttgctccctgtcgtctgcaccatagtaaatgccacaagggtagtcgaacacctctctggcccctagacctatctggggacaggctggctcagcctgtctccagggctgctgcggcccagccccgagcctgcctccctcttggcctctcatccattggctctgcagggcaggggtgaggcaggtttctgctcataagtgcttttggaagtcacctacctttttaacacagccgaactagtcccaacgcgtttgcaaatattcccctggtagcctacttccttacccccgaatattggtaagatcgagcaatggcttcaggacatgggttctcttctcctgtgatcattcaagtgctcactgcatgaagactggcttgtctcagtgtttcaacctcaccagggctgtctcttggtccacacctcgctccctgttagtgccgtatgacagcccccatcaaatgaccttggccaagtcacggtttctctgtggtcaaggttggttggctgattggtggaaagtagggtggaccaaaggaggccacgtgagcagtcagcaccagttctgcaccagcagcgcctccgtcctagtgggtgttcctgtttctcctggccctgggtgggctagggcctgattcgggaagatgcctttgcagggaggggaggataagtgggatctaccaattgattctggcttttgctttatgtgggaaacagatctaaatctcattttatgctgtattttatatcttagttgtgtttgaaaacgttttgatttttggaaa

SEQ ID NO: 612 - DNA, 2878 bp, Homo sapiens
gggaggctggggatggcgcgtggcccctttaagacgcaccggggcgggcccgggcggcgcgcggcccctttaaggcttggcctacgtggcagccgctggagccgcagccgacgcggagcgaggccggccgccgggcacttcctgtggaggccgcagcgggtgcgggcgccgacgggcgagagccagcgagcgagcgagcgagccgagccgagcctcccgccgtcgccatgggccagaacgacctgatgggcacggccgaggacttcgccgaccagttcctccgtgtcacaaagcagtacctgccccacgtggcgcgcctctgtctgatcagcaccttcctggaggacggcatccgtatgtggttccagtggagcgagcagcgcgactacatcgacaccacctggaactgcggctacctgctggcctcgtccttcgtcttcctcaacttgctgggacagctgactggctgcgtcctggtgttgagcaggaacttcgtgcagtacgcctgcttcgggctctttggaatcatagctctgcagacgattgcctacagcattttatgggacttgaagtttttgatgaggaacctggccctgggaggaggcctgttgctgctcctagcagaatcccgttctgaagggaagagcatgtttgcgggcgtccccaccatgcgtgagagctcccccaaacagtacatgcagctcggaggcagggtcttgctggttctgatgttcatgaccctccttcactttgacgccagcttcttttctattgtccagaacatcgtgggcacagctctgatgattttagtggccattggttttaaaaccaagctggctgctttgactcttgttgtgtggctctttgccatcaacgtatatttcaacgccttctggaccattccagtctacaagcccatgcatgacttcctgaaatacgacttcttccaatccctacctgcctggctaagacccgtggccgtcaaggactggttcggggtggattcaacaaaactgccagcttttatgtatcctcttcccttcccctcccttggtaaaggcacagatgttttgagaactttatttgcagagacacctgagaatcgatggctcagtctgctctggagccacagtctggcgtctgacccttcagtgcaggccagcctggcagctggaagcctcccccacgccgaggctttggagtgaacagcccgcttggctgtggcatctcagtcctatttttgagtttttttgtgggggtacaggagggggccttcaagctgtactgtgagcagacgcattggtattatcattcaaagcagtctccctcttatttgtaagtttacatttttagcggaaactactaaattattttgggtggttcagccaaacctcaaaacagttaatctccctggtttaaaatcacaccagtggctttgatgttgtttctgccccgcattgtattttataggaatagtgaaaacatttagggacacccaaagaatgatgcagtattaaaggggtggtagaagctgctgtttatgataaaagtcatcggtcagaaaatcagcttggattggtgccaagtgttttattgggtaacaccctgggagttttagtagcttgaggcaaggtggaggggcaagaagtctggcagtgggaagggctagtgagaccacacaggggtagccccagcagcagcaccctgcaagccagcctggccagctgctcagaccagcttgcagagccgcagccgctgtgggcagggggtgtggcaggagctcccagcactggagacccacggactcaacccagttacctcacatggggccttttctgagcaaggtctcgaaagcgcaggccgccctggctgagcagcaccgccctttcccagctgcactcgccctgtggacagccccgacacaccactttcctgaggctgtcgctcactcagattgtccgtttgctatgccgaatgcagccaaaattcctttttacaatttgtgatgccttaccgatttgatcttaatcctgtatttaaagttttctaacactgccttatactgtgtttctctttttgggggagcttaactgcttgttgctccctgtcgtctgcaccatagtaaatgccacaagggtagtcgaacacctctctggcccctagacctatctggggacaggctggctcagcctgtctccagggctgctgcggcccagccccgagcctgcctccctcttggcctctcatccattggctctgcagggcaggggtgaggcaggtttctgctcataagtgcttttggaagtcacctacctttttaacacagccgaactagtcccaacgcgtttgcaaatattcccctggtagcctacttccttacccccgaatattggtaagatcgagcaatggcttcaggacatgggttctcttctcctgtgatcattcaagtgctcactgcatgaagactggcttgtctcagtgtttcaacctcaccagggctgtctcttggtccacacctcgctccctgttagtgccgtatgacagcccccatcaaatgaccttggccaagtcacggtttctctgtggtcaaggttggttggctgattggtggaaagtagggtggaccaaaggaggccacgtgagcagtcagcaccagttctgcaccagcagcgcctccgtcctagtgggtgttcctgtttctcctggccctgggtgggctagggcctgattcgggaagatgcctttgcagggaggggaggataagtgggatctaccaattgattctggcttttgctttatgtgggaaacagatctaaatctcattttatgctgtattttatatcttagttgtgtttgaaaacgttttgatttttggaaa

SEQ ID NO: 613 - DNA, 5069 bp, Homo sapiens
cgggctggagcgaaagaatgcgggggctgagcgcagaagcggctcgaggctggaagaggatcttgggcgccgccaggttctgtggacaatcacaatgggaatccaaggagggtctgtcctgttcgggctgctgctcgtcctggctgtcttctgccattcaggtgagtcatagcctgcagtgctacaactgtcctaacccaactgctgactgcaaaacagccgtcaattgttcatctgattttgatgcgtgtctcattaccaaagctgggttacaagtgtataacaagtgttggaagtttgagcattgcaatttcaacgacgtcacaacccgcttgagggaaaatgagctaacgtactactgctgcaagaaggacctgtgtaactttaacgaacagcttgaaaatggtgggacatccttatcagagaaaacagttcttctgctggtgactccatttctggcagcagcctggagccttcatccctaagtcaacaccaggagagcttctcccaaactccccgttcctgcgtagtccgctttctcttgctgccacattctaaaggcttgatattttccaaatggatcctgttgggaaagaataaaattagcttgagcaacctggctaagatagaggggctctgggagactttgaagaccagtcctgtttgcagggaagccccacttgaaggaagaagtctaagagtgaagtaggtgtgacttgaactagattgcatgcttcctcctttgctcttgggaagaccagctttgcagtgacagcttgagtgggttctctgcagccctcagattatttttcctctggctccttggatgtagtcagttagcatcattagtacatctttggagggtggggcaggagtatatgagcatcctctctcacatggaacgctttcataaacttcagggatcccgtgttgccatggaggcatgccaaatgttccatatgtgggtgtcagtcagggacaacaagatccttaatgcagagctagaggacttctggcagggaagtggggaagtgttccagatagcagggcatgaaaacttagagaggtacaagtggctgaaaatcgagtttttcctctgtctttaaattttatatgggctttgttatcttccactggaaaagtgtaatagcatacatcaatggtgtgttaaagctatttccttgccttttttttattggaatggtaggatatcttggctttgccacacacagttacagagtgaacactctactacatgtgactggcagtattaagtgtgcttattttaaatgttactggtagaaaggcagttcaggtatgtgtgtatatagtatgaatgcagtggggacaccctttgtggttacagtttgagacttccaaaggtcatccttaataacaacagatctgcaggggtatgttttaccatctgcatccagcctcctgctaactcctagctgactcagcatagattgtataaaatacctttgtaacggctcttagcacactcacagatgtttgaggctttcagaagctcttctaaaaaatgatacacacctttcacaagggcaaactttttccttttccctgtgtattctagtgaatgaatctcaagattcagtagacctaatgacatttgtattttatgatcttggctgtatttaatggcataggctgacttttgcagatggaggaatttcttgattaatgttgaaaaaaaacccttgattatactctgttggacaaaccgagtgcaatgaatgatgcttttctgaaaatgaaatataacaagtgggtgaatgtggttatggccgaaaaggatatgcagtatgcttaatggtagcaactgaaagaagacatcctgagcagtgccagctttcttctgttgatgccgttccctgaacataggaaaatagaaacttgcttatcaaaacttagcattaccttggtgctctgtgttctctgttagctcagtgtctttccttacatcaataggtttttttttttttttttggcctgaggaagtactgaccatgcccacagccaccggctgagcaaagaagctcatttcatgtgagttctaaggaatgagaaacaattttgatgaatttaagcagaaaatgaatttctgggaacttttttgggggcgggggggtggggaattcagccacactccagaaagccaggagtcgacagttttggaagcctctctcaggattgagattctaggatgagattggcttactgctatcttgtgtcatgtacccactttttggccagactacactgggaagaaggtagtcctctaaagcaaaatctgagtgccactaaatggggagatggggctgttaagctgtccaaatcaacaagggtcatataaatggccttaaactttggggttgctttctgcaaaaagttgctgtgactcatgccatagacaaggttgagtgcctggacccaaaggcaatactgtaatgtaaagacatttatagtactaggcaaacagcaccccaggtactccaggccctcctggctggagagggctgtggcaatagaaaattagtgccaactgcagtgagtcagcctaggttaaatagagagtgtaagagtgctggacaggaacctccaccctcatgtcacatttcttcaatgtgacccttctggcccctctcctcctgacagcggaacaatgactgccccgataggtgaggctggaggaagaatcagtcctgtccttggcaagctcttcactatgacagtaaaggctctctgcctgctgccaaggcctgtgactttctaacctggcctcacgctgggtaagcttaaggtagaggtgcaggattagcaagcccacctggctaccaggccgacagctacatcctccaactgaccctgatcaacgaagagggattcatgtgtctgtctcagttggttccaaatgaaaccagggagcaggggagttaggaatcgaacaccagtcatgcctactggctctctgctcgagtggtgataagcccattggattgtccccttggggggatgagctaggggtgcaaggaacacctgatgagtagataagtggagctcatggtatttcctgaaagatgctaatctatttgccaaacttggtcttgaatgtactgggggcttcaaggtatgggtatatttttcttgtgtccttgcagttagcccccatgtcttatgtgtgtcctgaaaaaataagagcctgcccaagactttgggcctcttgacagaattaaccacttttatacatctgagttctcttggtaagttctttagcagtgttcaaagtctactagctcgcattagtttctgttgctgccaacagatctgaactaatgctaacagatccccctgagggattcttgatgggctgagcagctggctggagctagtactgactgacattcattgtgatgagggcagctttctggtacaggattctaagctctatgttttctatacattttcatctgtacttgcacctcactttacacaagaggaaactatgcaaagttagctggatcgctcaaggtcacttaggtaagttggcaagtccatgcttcccactcagctcctcaggtcagcaagtctacttctctgcctattttgtatactctctttaatatgtgcctagctttggaaagtctagaatgggtccctggtgcctttttactttgaagaaatcagtttctgcctctttttggaaaagaaaacaaagtgcaattgttttttactggaaagttacccaatagcatgaggtgaacaggacgtagttaggccttcctgtaaacagaaaatcatatcaaaacactatcttcccatctgtttctcaatgcctgctacttcttgtagatatttcatttcaggagagcagcagttaaacccgtggattttgtagttaggaacctgggttcaaaccctcttccactaattggctatgtctctggacaagtttttttttttttttttttttaaaccctttctgaactttcactttctatgtctacctcaaagaattgttgtgaggcttgagataatgcatttgtaaagggtctgccagataggaagatgctagttatggatttacaaggttgttaaggctgtaagagtctaaaacctacagtgaatcacaatgcatttacccccactgacttggacataagtgaaaactagccagaagtctctttttcaaattacttacaggttattcaatataaaatttttgtaatggataatcttatttatctaaactaaagcttcctgtttatacacactcctgttattctgggataagataaatgaccacagtaccttaatttctaggtgggtgcctgtgatggttcattgtaggtaaggacattttctctttttcagcagctgtgtaggtccagagcctctgggagaggaggggggtagcatgcacccagcaggggactgaactgggaaactcaaggttctttttactgtggggtagtgagctgcctttctgtgatcggtttccctagggatgttgctgttcccctccttgctattcgcagctacatacaacgtggccaaccccagtaggctgatcctatatatgatcagtgctggtgctgactctcaatagccccacccaagctggctataggtttacagatacattaattaggcaacctaaaatattgatgctggtgttggtgtgacataatgctatggccagaactgaaacttagagttataattcatgtattagggttctccagagggacagaattagtaggatatatgtatatatgaaagggaggttattagggagaactggctcccacagttagaaggcgaagtcgcacaataggccgtctgcaagctgggttagagagaagccagtagtggctcagcctgagttcaaaaacctcaaaactggggaagctgacagtgcagccagccttcagtctgtggccaaaggcccaagagcccctggcaaccaacccactggtgcaagtcctagattccaaaggctgaagaacctggagtctgatgtccaagagcaggaagagtggaagaaa

SEQ ID NO: 614 - DNA, 3653 bp, Homo sapiens
gcgcagaagcggctcgaggctggaagaggatcttgggcgccgccagtctctctctgttgcccaagctggagtgcagtggcacagtcttggctcactgcaacctccacctcctgggtgcaagcgattctcgtgtctcagcctctcaagtagctgggattacagtctttagcaccagttggtgtaggagttgagacctacttcacagtagttctgtggacaatcacaatgggaatccaaggagggtctgtcctgttcgggctgctgctcgtcctggctgtcttctgccattcaggtcatagcctgcagtgctacaactgtcctaacccaactgctgactgcaaaacagccgtcaattgttcatctgattttgatgcgtgtctcattaccaaagctgggttacaagtgtataacaagtgttggaagtttgagcattgcaatttcaacgacgtcacaacccgcttgagggaaaatgagctaacgtactactgctgcaagaaggacctgtgtaactttaacgaacagcttgaaaatggtgggacatccttatcagagaaaacagttcttctgctggtgactccatttctggcagcagcctggagccttcatccctaagtcaacaccaggagagcttctcccaaactccccgttcctgcgtagtccgctttctcttgctgccacattctaaaggcttgatattttccaaatggatcctgttgggaaagaataaaattagcttgagcaacctggctaagatagaggggctctgggagactttgaagaccagtcctgtttgcagggaagccccacttgaaggaagaagtctaagagtgaagtaggtgtgacttgaactagattgcatgcttcctcctttgctcttgggaagaccagctttgcagtgacagcttgagtgggttctctgcagccctcagattatttttcctctggctccttggatgtagtcagttagcatcattagtacatctttggagggtggggcaggagtatatgagcatcctctctcacatggaacgctttcataaacttcagggatcccgtgttgccatggaggcatgccaaatgttccatatgtgggtgtcagtcagggacaacaagatccttaatgcagagctagaggacttctggcagggaagtggggaagtgttccagatagcagggcatgaaaacttagagaggtacaagtggctgaaaatcgagtttttcctctgtctttaaattttatatgggctttgttatcttccactggaaaagtgtaatagcatacatcaatggtgtgttaaagctatttccttgccttttttttattggaatggtaggatatcttggctttgccacacacagttacagagtgaacactctactacatgtgactggcagtattaagtgtgcttattttaaatgttactggtagaaaggcagttcaggtatgtgtgtatatagtatgaatgcagtggggacaccctttgtggttacagtttgagacttccaaaggtcatccttaataacaacagatctgcaggggtatgttttaccatctgcatccagcctcctgctaactcctagctgactcagcatagattgtataaaatacctttgtaacggctcttagcacactcacagatgtttgaggctttcagaagctcttctaaaaaatgatacacacctttcacaagggcaaactttttccttttccctgtgtattctagtgaatgaatctcaagattcagtagacctaatgacatttgtattttatgatcttggctgtatttaatggcataggctgacttttgcagatggaggaatttcttgattaatgttgaaaaaaaacccttgattatactctgttggacaaaccgagtgcaatgaatgatgcttttctgaaaatgaaatataacaagtgggtgaatgtggttatggccgaaaaggatatgcagtatgcttaatggtagcaactgaaagaagacatcctgagcagtgccagctttcttctgttgatgccgttccctgaacataggaaaatagaaacttgcttatcaaaacttagcattaccttggtgctctgtgttctctgttagctcagtgtctttccttacatcaataggtttttttttttttttttggcctgaggaagtactgaccatgcccacagccaccggctgagcaaagaagctcatttcatgtgagttctaaggaatgagaaacaattttgatgaatttaagcagaaaatgaatttctgggaacttttttgggggcgggggggtggggaattcagccacactccagaaagccaggagtcgacagttttggaagcctctctcaggattgagattctaggatgagattggcttactgctatcttgtgtcatgtacccactttttggccagactacactgggaagaaggtagtcctctaaagcaaaatctgagtgccactaaatggggagatggggctgttaagctgtccaaatcaacaagggtcatataaatggccttaaactttggggttgctttctgcaaaaagttgctgtgactcatgccatagacaaggttgagtgcctggacccaaaggcaatactgtaatgtaaagacatttatagtactaggcaaacagcaccccaggtactccaggccctcctggctggagagggctgtggcaatagaaaattagtgccaactgcagtgagtcagcctaggttaaatagagagtgtaagagtgctggacaggaacctccaccctcatgtcacatttcttcaatgtgacccttctggcccctctcctcctgacagcggaacaatgactgccccgataggtgaggctggaggaagaatcagtcctgtccttggcaagctcttcactatgacagtaaaggctctctgcctgctgccaaggcctgtgactttctaacctggcctcacgctgggtaagcttaaggtagaggtgcaggattagcaagcccacctggctaccaggccgacagctacatcctccaactgaccctgatcaacgaagagggattcatgtgtctgtctcagttggttccaaatgaaaccagggagcaggggagttaggaatcgaacaccagtcatgcctactggctctctgctcgagagccaataccctgtgccctccactcatctggatttacaggaactgtcatagtgttcagtattgggtggtgataagcccattggattgtccccttggggggatgagctaggggtgcaaggaacacctgatgagtagataagtggagctcatggtatttcctgaaagatgctaatctatttgccaaacttggtcttgaatgtactgggggcttcaaggtatgggtatatttttcttgtgtccttgcagttagcccccatgtcttatgtgtgtcctgaaaaaataagagcctgcccaagactttgggcctcttgacagaattaaccacttttatacatctgagttctcttggtaagttctttagcagtgttcaaagtctactagctcgcattagtttctgttgctgccaacagatctgaactaatgctaacagatccccctgagggattcttgatgggctgagcagctggctggagctagtactgactgacattcattgtgatgagggcagctttctggtacaggatt

SEQ ID NO: 615 - DNA, 3446 bp, Homo sapiens
gttctgtggacaatcacaatgggaatccaaggagggtctgtcctgttcgggctgctgctcgtcctggctgtcttctgccattcaggtcatagcctgcagtgctacaactgtcctaacccaactgctgactgcaaaacagccgtcaattgttcatctgattttgatgcgtgtctcattaccaaagctgggttacaagtgtataacaagtgttggaagtttgagcattgcaatttcaacgacgtcacaacccgcttgagggaaaatgagctaacgtactactgctgcaagaaggacctgtgtaactttaacgaacagcttgaaaatggtgggacatccttatcagagaaaacagttcttctgctggtgactccatttctggcagcagcctggagccttcatccctaagtcaacaccaggagagcttctcccaaactccccgttcctgcgtagtccgctttctcttgctgccacattctaaaggcttgatattttccaaatggatcctgttgggaaagaataaaattagcttgagcaacctggctaagatagaggggctctgggagactttgaagaccagtcctgtttgcagggaagccccacttgaaggaagaagtctaagagtgaagtaggtgtgacttgaactagattgcatgcttcctcctttgctcttgggaagaccagctttgcagtgacagcttgagtgggttctctgcagccctcagattatttttcctctggctccttggatgtagtcagttagcatcattagtacatctttggagggtggggcaggagtatatgagcatcctctctcacatggaacgctttcataaacttcagggatcccgtgttgccatggaggcatgccaaatgttccatatgtgggtgtcagtcagggacaacaagatccttaatgcagagctagaggacttctggcagggaagtggggaagtgttccagatagcagggcatgaaaacttagagaggtacaagtggctgaaaatcgagtttttcctctgtctttaaattttatatgggctttgttatcttccactggaaaagtgtaatagcatacatcaatggtgtgttaaagctatttccttgccttttttttattggaatggtaggatatcttggctttgccacacacagttacagagtgaacactctactacatgtgactggcagtattaagtgtgcttattttaaatgttactggtagaaaggcagttcaggtatgtgtgtatatagtatgaatgcagtggggacaccctttgtggttacagtttgagacttccaaaggtcatccttaataacaacagatctgcaggggtatgttttaccatctgcatccagcctcctgctaactcctagctgactcagcatagattgtataaaatacctttgtaacggctcttagcacactcacagatgtttgaggctttcagaagctcttctaaaaaatgatacacacctttcacaagggcaaactttttccttttccctgtgtattctagtgaatgaatctcaagattcagtagacctaatgacatttgtattttatgatcttggctgtatttaatggcataggctgacttttgcagatggaggaatttcttgattaatgttgaaaaaaaacccttgattatactctgttggacaaaccgagtgcaatgaatgatgcttttctgaaaatgaaatataacaagtgggtgaatgtggttatggccgaaaaggatatgcagtatgcttaatggtagcaactgaaagaagacatcctgagcagtgccagctttcttctgttgatgccgttccctgaacataggaaaatagaaacttgcttatcaaaacttagcattaccttggtgctctgtgttctctgttagctcagtgtctttccttacatcaataggtttttttttttttttttggcctgaggaagtactgaccatgcccacagccaccggctgagcaaagaagctcatttcatgtgagttctaaggaatgagaaacaattttgatgaatttaagcagaaaatgaatttctgggaacttttttgggggcgggggggtggggaattcagccacactccagaaagccaggagtcgacagttttggaagcctctctcaggattgagattctaggatgagattggcttactgctatcttgtgtcatgtacccactttttggccagactacactgggaagaaggtagtcctctaaagcaaaatctgagtgccactaaatggggagatggggctgttaagctgtccaaatcaacaagggtcatataaatggccttaaactttggggttgctttctgcaaaaagttgctgtgactcatgccatagacaaggttgagtgcctggacccaaaggcaatactgtaatgtaaagacatttatagtactaggcaaacagcaccccaggtactccaggccctcctggctggagagggctgtggcaatagaaaattagtgccaactgcagtgagtcagcctaggttaaatagagagtgtaagagtgctggacaggaacctccaccctcatgtcacatttcttcaatgtgacccttctggcccctctcctcctgacagcggaacaatgactgccccgataggtgaggctggaggaagaatcagtcctgtccttggcaagctcttcactatgacagtaaaggctctctgcctgctgccaaggcctgtgactttctaacctggcctcacgctgggtaagcttaaggtagaggtgcaggattagcaagcccacctggctaccaggccgacagctacatcctccaactgaccctgatcaacgaagagggattcatgtgtctgtctcagttggttccaaatgaaaccagggagcaggggagttaggaatcgaacaccagtcatgcctactggctctctgctcgagagccaataccctgtgccctccactcatctggatttacaggaactgtcatagtgttcagtattgggtggtgataagcccattggattgtccccttggggggatgagctaggggtgcaaggaacacctgatgagtagataagtggagctcatggtatttcctgaaagatgctaatctatttgccaaacttggtcttgaatgtactgggggcttcaaggtatgggtatatttttcttgtgtccttgcagttagcccccatgtcttatgtgtgtcctgaaaaaataagagcctgcccaagactttgggcctcttgacagaattaaccacttttatacatctgagttctcttggtaagttctttagcagtgttcaaagtctactagctcgcattagtttctgttgctgccaacagatctgaactaatgctaacagatccccctgagggattcttgatgggctgagcagctggctggagctagtactgactgacattcattgtgatgagggcagctttctggtacaggatt

SEQ ID NO: 616 - DNA, 550 bp, Homo sapiens
tgggagcgtccgggggcccatctctctcgggtggagtcttctgacagctggtgcgcctgcccgggaacatcctcctggactcaatcatggcttgtggtctggtcgccagcaacctgaatctcaaacctggagagtgccttcgagtgcgaggcgaggtggctcctgacgctaagagcttcgtgctgaacctgggcaaagacagcaacaacctgtgcctgcacttcaaccctcgcttcaacgcccacggcgacgccaacaccatcgtgtgcaacagcaaggacggcggggcctgggggaccgagcagcgggaggctgtctttcccttccagcctggaagtgttgcagaggtgtgcatcaccttcgaccaggccaacctgaccgtcaagctgccagatggatacgaattcaagttccccaaccgcctcaacctggaggccatcaactacatggcagctgacggtgacttcaagatcaaatgtgtggcctttgactgaaatcagccagcccatggcccccaataaaggcagctgcctctgctccctctgaacca

SEQ ID NO: 617 - DNA, 2635 bp, Homo sapiens
ggcagtgggcgtggcggtgctgcccaggtgagccaccgctgcttctgcccagacacggtcgcctccacatccaggtctttgtgctcctcgcttgcctgttccttttccacgcattttccaggataactgtgactccaggcccgcaatggatgccctgcaactagcaaattcggcttttgccgttgatctgttcaaacaactatgtgaaaaggagccactgggcaatgtcctcttctctccaatctgtctctccacctctctgtcacttgctcaagtgggtgctaaaggtgacactgcaaatgaaattggacaggttcttcattttgaaaatgtcaaagatgtaccctttggatttcaaacagtaacatcggatgtaaacaaacttagttccttttactcactgaaactaatcaagcggctctacgtagacaaatctctgaatctttctacagagttcatcagctctacgaagagaccgtatgcaaaggaattggaaactgttgacttcaaagataaattggaagaaacgaaaggtcagatcaacaactcaattaaggatctcacagatggccactttgagaacattttagctgacaacagtgtgaacgaccagaccaaaatccttgtggttaatgctgcctactttgttggcaagtggatgaagaaattttctgaatcagaaacaaaagaatgtcctttcagagtcaacaagacagacaccaaaccagtgcagatgatgaacatggaggccacgttctgtatgggaaacattgacagtatcaattgtaagatcatagagcttccttttcaaaataagcatctcagcatgttcatcctactacccaaggatgtggaggatgagtccacaggcttggagaagattgaaaaacaactcaactcagagtcactgtcacagtggactaatcccagcaccatggccaatgccaaggtcaaactctccattccaaaatttaaggtggaaaagatgattgatcccaaggcttgtctggaaaatctagggctgaaacatatcttcagtgaagacacatctgatttctctggaatgtcagagaccaagggagtggccctatcaaatgttatccacaaagtgtgcttagaaataactgaagatggtggggattccatagaggtgccaggagcacggatcctgcagcacaaggatgaattgaatgctgaccatccctttatttacatcatcaggcacaacaaaactcgaaacatcattttctttggcaaattctgttctccttaagtggcatagcccatgttaagtcctccctgacttttctgtggatgccgatttctgtaaactctgcatccagagattcattttctagatacaataaattgctaatgttgctggatcaggaagccgccagtacttgtcatatgtagccttcacacagatagaccttttttttttttccaattctatcttttgtttccttttttcccataagacaatgacatacgcttttaatgaaaaggaatcacgttagaggaaaaatatttattcattatttgtcaaattgtccggggtagttggcagaaatacagtcttccacaaagaaaattcctataaggaagatttggaagctcttcttcccagcactatgctttccttctttgggatagagaatgttccagacattctcgcttccctgaaagactgaagaaagtgtagtgcatgggacccacgaaactgccctggctccagtgaaacttgggcacatgctcaggctactataggtccagaagtccttatgttaagccctggcaggcaggtgtttattaaaattctgaattttggggattttcaaaagataatattttacatacactgtatgttatagaacttcatggatcagatctggggcagcaccctataaatcaacaccttaatatgctgcaacaaaatgtagaatattcagacaaaatggatacataaagactaagtagcccataaggggtcaaaatttgctgccaaatgcgtatgccaccaacttacaaaaacacttcgttcgcagagcttttcagattgtggaatgttggataaggaattatagacctctagtagctgaaatgcaagaccccaagaggaagttcagatcttaatataaattcactttcatttttgatagctgtcccatctggtcatttggttggcactagactggtggcaggggcttctagctgacttgcacagggattctcacaatagccgatatcagaatttgtgttgaaggaacttgtctcttcatctaatatgatagcgggaaaaggagaggaaactactgcctttagaaaatataagtaaagtgattaaagtgctcacgttaccttgacacatagtttttcagtctatgggtttagttactttagatggcaagcatgtaacttatattaatagtaatttgtaaagttggttggataagctatccgtgttgcaggttcatggattacttctctataaaaaatatgtatttaccaaaaattttgtgacattccttctcccatctcttccttgacctgcattgtaaataggttcttcttgttctgagattcaatattgaatttttcctatgctattgacaataaaatattattgaactac

SEQ ID NO: 618 - DNA, 2589 bp, Homo sapiens
cagacacggtcgcctccacatccaggtctttgtgctcctcgcttgcctgttccttttccacgcattttccaggataacttccttgcttccaggcccgcaatggatgccctgcaactagcaaattcggcttttgccgttgatctgttcaaacaactatgtgaaaaggagccactgggcaatgtcctcttctctccaatctgtctctccacctctctgtcacttgctcaagtgggtgctaaaggtgacactgcaaatgaaattggacaggttcttcattttgaaaatgtcaaagatgtaccctttggatttcaaacagtaacatcggatgtaaacaaacttagttccttttactcactgaaactaatcaagcggctctacgtagacaaatctctgaatctttctacagagttcatcagctctacgaagagaccgtatgcaaaggaattggaaactgttgacttcaaagataaattggaagaaacgaaaggtcagatcaacaactcaattaaggatctcacagatggccactttgagaacattttagctgacaacagtgtgaacgaccagaccaaaatccttgtggttaatgctgcctactttgttggcaagtggatgaagaaattttctgaatcagaaacaaaagaatgtcctttcagagtcaacaagacagacaccaaaccagtgcagatgatgaacatggaggccacgttctgtatgggaaacattgacagtatcaattgtaagatcatagagcttccttttcaaaataagcatctcagcatgttcatcctactacccaaggatgtggaggatgagtccacaggcttggagaagattgaaaaacaactcaactcagagtcactgtcacagtggactaatcccagcaccatggccaatgccaaggtcaaactctccattccaaaatttaaggtggaaaagatgattgatcccaaggcttgtctggaaaatctagggctgaaacatatcttcagtgaagacacatctgatttctctggaatgtcagagaccaagggagtggccctatcaaatgttatccacaaagtgtgcttagaaataactgaagatggtggggattccatagaggtgccaggagcacggatcctgcagcacaaggatgaattgaatgctgaccatccctttatttacatcatcaggcacaacaaaactcgaaacatcattttctttggcaaattctgttctccttaagtggcatagcccatgttaagtcctccctgacttttctgtggatgccgatttctgtaaactctgcatccagagattcattttctagatacaataaattgctaatgttgctggatcaggaagccgccagtacttgtcatatgtagccttcacacagatagaccttttttttttttccaattctatcttttgtttccttttttcccataagacaatgacatacgcttttaatgaaaaggaatcacgttagaggaaaaatatttattcattatttgtcaaattgtccggggtagttggcagaaatacagtcttccacaaagaaaattcctataaggaagatttggaagctcttcttcccagcactatgctttccttctttgggatagagaatgttccagacattctcgcttccctgaaagactgaagaaagtgtagtgcatgggacccacgaaactgccctggctccagtgaaacttgggcacatgctcaggctactataggtccagaagtccttatgttaagccctggcaggcaggtgtttattaaaattctgaattttggggattttcaaaagataatattttacatacactgtatgttatagaacttcatggatcagatctggggcagcaccctataaatcaacaccttaatatgctgcaacaaaatgtagaatattcagacaaaatggatacataaagactaagtagcccataaggggtcaaaatttgctgccaaatgcgtatgccaccaacttacaaaaacacttcgttcgcagagcttttcagattgtggaatgttggataaggaattatagacctctagtagctgaaatgcaagaccccaagaggaagttcagatcttaatataaattcactttcatttttgatagctgtcccatctggtcatttggttggcactagactggtggcaggggcttctagctgacttgcacagggattctcacaatagccgatatcagaatttgtgttgaaggaacttgtctcttcatctaatatgatagcgggaaaaggagaggaaactactgcctttagaaaatataagtaaagtgattaaagtgctcacgttaccttgacacatagtttttcagtctatgggtttagttactttagatggcaagcatgtaacttatattaatagtaatttgtaaagttggttggataagctatccgtgttgcaggttcatggattacttctctataaaaaatatgtatttaccaaaaattttgtgacattccttctcccatctcttccttgacctgcattgtaaataggttcttcttgttctgagattcaatattgaatttttcctatgctattgacaataaaatattattgaactac

SEQ ID NO: 619 - DNA, 2593 bp, Homo sapiens
cagacacggtcgcctccacatccaggtctttgtgctcctcgcttgcctgttccttttccacgcattttccaggataacttccttgcttccaggcccgcaatggatgccctgcaactagcaaattcggcttttgccgttgatctgttcaaacaactatgtgaaaaggagccactgggcaatgtcctcttctctccaatctgtctctccacctctctgtcacttgctcaagtgggtgctaaaggtgacactgcaaatgaaattggacaggttcttcattttgaaaatgtcaaagatgtaccctttggatttcaaacagtaacatcggatgtaaacaaacttagttccttttactcactgaaactaatcaagcggctctacgtagacaaatctctgaatctttctacagagttcatcagctctacgaagagaccgtatgcaaaggaattggaaactgttgacttcaaagataaattggaagaaacgaaaggtcagatcaacaactcaattaaggatctcacagatggcaagccactttgagaacattttagctgacaacagtgtgaacgaccagaccaaaatccttgtggttaatgctgcctactttgttggcaagtggatgaagaaattttctgaatcagaaacaaaagaatgtcctttcagagtcaacaagacagacaccaaaccagtgcagatgatgaacatggaggccacgttctgtatgggaaacattgacagtatcaattgtaagatcatagagcttccttttcaaaataagcatctcagcatgttcatcctactacccaaggatgtggaggatgagtccacaggcttggagaagattgaaaaacaactcaactcagagtcactgtcacagtggactaatcccagcaccatggccaatgccaaggtcaaactctccattccaaaatttaaggtggaaaagatgattgatcccaaggcttgtctggaaaatctagggctgaaacatatcttcagtgaagacacatctgatttctctggaatgtcagagaccaagggagtggccctatcaaatgttatccacaaagtgtgcttagaaataactgaagatggtggggattccatagaggtgccaggagcacggatcctgcagcacaaggatgaattgaatgctgaccatccctttatttacatcatcaggcacaacaaaactcgaaacatcattttctttggcaaattctgttctccttaagtggcatagcccatgttaagtcctccctgacttttctgtggatgccgatttctgtaaactctgcatccagagattcattttctagatacaataaattgctaatgttgctggatcaggaagccgccagtacttgtcatatgtagccttcacacagatagaccttttttttttttccaattctatcttttgtttccttttttcccataagacaatgacatacgcttttaatgaaaaggaatcacgttagaggaaaaatatttattcattatttgtcaaattgtccggggtagttggcagaaatacagtcttccacaaagaaaattcctataaggaagatttggaagctcttcttcccagcactatgctttccttctttgggatagagaatgttccagacattctcgcttccctgaaagactgaagaaagtgtagtgcatgggacccacgaaactgccctggctccagtgaaacttgggcacatgctcaggctactataggtccagaagtccttatgttaagccctggcaggcaggtgtttattaaaattctgaattttggggattttcaaaagataatattttacatacactgtatgttatagaacttcatggatcagatctggggcagcaccctataaatcaacaccttaatatgctgcaacaaaatgtagaatattcagacaaaatggatacataaagactaagtagcccataaggggtcaaaatttgctgccaaatgcgtatgccaccaacttacaaaaacacttcgttcgcagagcttttcagattgtggaatgttggataaggaattatagacctctagtagctgaaatgcaagaccccaagaggaagttcagatcttaatataaattcactttcatttttgatagctgtcccatctggtcatttggttggcactagactggtggcaggggcttctagctgacttgcacagggattctcacaatagccgatatcagaatttgtgttgaaggaacttgtctcttcatctaatatgatagcgggaaaaggagaggaaactactgcctttagaaaatataagtaaagtgattaaagtgctcacgttaccttgacacatagtttttcagtctatgggtttagttactttagatggcaagcatgtaacttatattaatagtaatttgtaaagttggttggataagctatccgtgttgcaggttcatggattacttctctataaaaaatatgtatttaccaaaaattttgtgacattccttctcccatctcttccttgacctgcattgtaaataggttcttcttgttctgagattcaatattgaatttttcctatgctattgacaataaaatattattgaactac

SEQ ID NO: 620 - DNA, 2520 bp, Homo sapiens
agcgcggcgcgggcccaacgagcgcacgcgtacacgcgtgcgcaggggaagaccgagtgccaggggctgaaccgcagggaagggggcgcggcgcacgcagtatggcgcccaacatctacttggttcgccagcggatcagtcgactcggccagaggatgtccggcttccagatcaacctcaacccgctcaaggagccactcggcttcatcaaggtcctcgagtggattgcttctatctttgcttttgccacctgtggaggttttaagggccaaacagaaattcaagtgaattgtcctcctgcagttactgagaataaaactgttacagctacttttggttatccattcaggttgaatgaggcatcatttcagccacctccaggtgtaaacatatgtgatgtaaattggaaagattacgtcctcataggcgattactcttcttctgcacaattctatgttacctttgcagtctttgtgttcctgtactgcattgctgcccttctgctttatgttggctacacgagtctgtatctggatagtcgtaaacttcctatgatagactttgttgttacacttgttgccacttttttgtggttggtgagcacttcagcctgggctaaagctctgacagatattaaaatagctactggtcacaatattattgatgaacttccgccttgtaagaagaaagcagtactgtgttactttggctctgtgaccagtatgggatccctaaatgtatctgtgatatttggctttctaaatatgatactctggggaggaaatgcttggtttgtgtacaaggagaccagcctacacagtccatcaaatacatctgcccctcatagccaaggaggtattccacctcctaccggaatataattaaagggagaaatacactgtatgaagtatatgttgatactatgacatgttgccaacaccttgagaagcattatttgtttctaataaaagtaatggctttgtcaatatattggtgggtttaaaactttgctgcttttttacataaagcctgtgcctttcctagaaagttaagatgtaaatgtattctcacatgtaaatttgaaagttcaggggtctattatgaaatgatacacatttttaaatgaaccataatttttttcactaagctgtttgccttccaaagtgtttacaccttaagccttaacatgtatcttcattcagaaaacagttatattgtcataccatagtaggaagaaaaacctttatttggaatatacactactgtaagtttgtacagatcatatacctaccacctgtctttgcttaaagagccttgattacataaatatgtaggaaaaaacatattgagttcaaaatttatatctaacattgtttatgttatgatttttttttaattgcaaagactaggtgtatatttttttctgtttttctaaatgacccgtggtacttaataggtgtactaaaattgtgttgggagcagggatttggaaatttctgagagatgtgtagttaatttagtaattctgtttcatgagatatgatctgttatgctagtggtttaataggcttgctatgtaagtagaacgtggctcaactagatatctttatatgtatgggcattactcttagtgatatttgtttcctgtcctttgttgctcatgctgtttaagtgcaggctgagacccagcctctttgtaagtacagtaaaataatccaccgttttttacagaccctagtcaaagggttaaaaaaattaagattgctttccatgtttgaaatttaccattgagagtcaatgaagttgctattttgagtttagcattgatattgtgaaaataagtgcaatttggatttcatgtttcttaatattcattcttgtttcacaaatgaatgattaaggaattatgcatcataaaggaacctaagtgaggtatatgatgagtgtattgtctttgcacacacatataggtatattctgaatacaagcttattcacattttgcttcctaatctttttgttgtacagggattcaggtttcttattcttacaacatgattgtttatatgtgaagcacatcttgctgttgccttatttttgatgcttttattcatgacaagaattgtcaatataagaatgtatatcttttttgcaaccaatttaataaaggagttgaaagaaagagtgcactgattgttaatattacaaagaaaccttcatcttaaaggcattgagcagtgcaaaacagaactgattttcaaagcaggaaatagaatcacagttttaatgtttggcaaggaataaaacagacagaaatgctttggagactatggttctatccttttttcttccgacctcatttagaaaatacttatttgcaactcttagattgttttcctgatataccttttctcattaattgtctaattaactagcaaagattcctgcttaagagtgtgtgctctgcaaccaaactgcctagatttgaatcttgtctacaccacttactagctgtttaact

SEQ ID NO: 621 - DNA, 2443 bp, Homo sapiens
agcgcggcgcgggcccaacgagcgcacgcgtacacgcgtgcgcaggggaagaccgagtgccaggggctgaaccgcagggaagggggcgcggcgcacgcagtatggcgcccaacatctacttggttcgccagcggatcagtcgactcggccagaggatgtccggcttccagatcaacctcaacccgctcaaggagccactcggcttcatcaaggtcctcgagtggattgcttctatctttgcttttgccacctgtggaggttttaagggccaaacagaaattcaagtgaattgtcctcctgcagttactgagaataaaactgttacagctacttttggttatccattcaggttgaatgaggcatcatttcagccacctccaggtgtaaacatatgtgatgtaaattggaaagattacgtcctcataggcgattactcttcttctgcacaattctatgttacctttgcagtctttgtgttcctgtactgcattgctgcccttctgctttatgttggctacacgagtctgtatctggatagtcgtaaacttcctatgatagactttgttgttacacttgttgccacttttttgtggttggtgagcacttcagcctgggctaaagctctgacagatattaaaatagctactggtcacaatattattgatgaacttccgccttgtaagaagaaagcagtactgtgttactttggctctgtgaccagtatgggatccctaaatgtatctgtgatatttggctttctaaatatgatactctggggaggaaatgcttggtttgtgtacaaggagaccagcctacacagtccatcaaatacatctgcccctcatagccaaggaggtattccacctcctaccggaatataattaaagggagaaatacactgtatgaagtatatgttgatactatgacatgttgccaacaccttgagaagcattatttgtttctaataaaagtaatggctttgtcaatatattggtgggtttaaaactttgctgcttttttacataaagcctgtgcctttcctagaaagttaagatgtaaatgtattctcacatgtaaatttgaaagttcaggggtctattatgaaatgatacacatttttaaatgaaccataatttttttcactaagctgtttgccttccaaagtgtttacaccttaagccttaacatgtatcttcattcagaaaacagttatattgtcataccatagtaggaagaaaaacctttatttggaatatacactactgtaagtttgtacagatcatatacctaccacctgtctttgcttaaagagccttgattacataaatatgtaggaaaaaacatattgagttcaaaatttatatctaacattgtttatgttatgatttttttttaattgcaaagactaggtgtatatttttttctgtttttctaaatgacccgtggtacttaataggtgtactaaaattgtgttgggagcagggatttggaaatttctgagagatgtgtagttaatttagtaattctgtttcatgagatatgatctgttatgctagtggtttaataggcttgctatgtaagtagaacgtggctcaactagatatctttatatgtatgggcatagtacagtaaaataatccaccgttttttacagaccctagtcaaagggttaaaaaaattaagattgctttccatgtttgaaatttaccattgagagtcaatgaagttgctattttgagtttagcattgatattgtgaaaataagtgcaatttggatttcatgtttcttaatattcattcttgtttcacaaatgaatgattaaggaattatgcatcataaaggaacctaagtgaggtatatgatgagtgtattgtctttgcacacacatataggtatattctgaatacaagcttattcacattttgcttcctaatctttttgttgtacagggattcaggtttcttattcttacaacatgattgtttatatgtgaagcacatcttgctgttgccttatttttgatgcttttattcatgacaagaattgtcaatataagaatgtatatcttttttgcaaccaatttaataaaggagttgaaagaaagagtgcactgattgttaatattacaaagaaaccttcatcttaaaggcattgagcagtgcaaaacagaactgattttcaaagcaggaaatagaatcacagttttaatgtttggcaaggaataaaacagacagaaatgctttggagactatggttctatccttttttcttccgacctcatttagaaaatacttatttgcaactcttagattgttttcctgatataccttttctcattaattgtctaattaactagcaaagattcctgcttaagagtgtgtgctctgcaaccaaactgcctagatttgaatcttgtctacaccacttactagctgtttaact

SEQ ID NO: 622 - DNA, 2483 bp, Homo sapiens
cgagcccggccagcgcgccagccccgcctgcccttcctcgccaccgggctgctctggtctcgtcggtcccctcctccgccccgtcgtcctgactctctctccctcctttcctcagaggatgtccggcttccagatcaacctcaacccgctcaaggagccactcggcttcatcaaggtcctcgagtggattgcttctatctttgcttttgccacctgtggaggttttaagggccaaacagaaattcaagtgaattgtcctcctgcagttactgagaataaaactgttacagctacttttggttatccattcaggttgaatgaggcatcatttcagccacctccaggtgtaaacatatgtgatgtaaattggaaagattacgtcctcataggcgattactcttcttctgcacaattctatgttacctttgcagtctttgtgttcctgtactgcattgctgcccttctgctttatgttggctacacgagtctgtatctggatagtcgtaaacttcctatgatagactttgttgttacacttgttgccacttttttgtggttggtgagcacttcagcctgggctaaagctctgacagatattaaaatagctactggtcacaatattattgatgaacttccgccttgtaagaagaaagcagtactgtgttactttggctctgtgaccagtatgggatccctaaatgtatctgtgatatttggctttctaaatatgatactctggggaggaaatgcttggtttgtgtacaaggagaccagcctacacagtccatcaaatacatctgcccctcatagccaaggaggtattccacctcctaccggaatataattaaagggagaaatacactgtatgaagtatatgttgatactatgacatgttgccaacaccttgagaagcattatttgtttctaataaaagtaatggctttgtcaatatattggtgggtttaaaactttgctgcttttttacataaagcctgtgcctttcctagaaagttaagatgtaaatgtattctcacatgtaaatttgaaagttcaggggtctattatgaaatgatacacatttttaaatgaaccataatttttttcactaagctgtttgccttccaaagtgtttacaccttaagccttaacatgtatcttcattcagaaaacagttatattgtcataccatagtaggaagaaaaacctttatttggaatatacactactgtaagtttgtacagatcatatacctaccacctgtctttgcttaaagagccttgattacataaatatgtaggaaaaaacatattgagttcaaaatttatatctaacattgtttatgttatgatttttttttaattgcaaagactaggtgtatatttttttctgtttttctaaatgacccgtggtacttaataggtgtactaaaattgtgttgggagcagggatttggaaatttctgagagatgtgtagttaatttagtaattctgtttcatgagatatgatctgttatgctagtggtttaataggcttgctatgtaagtagaacgtggctcaactagatatctttatatgtatgggcattactcttagtgatatttgtttcctgtcctttgttgctcatgctgtttaagtgcaggctgagacccagcctctttgtaagtacagtaaaataatccaccgttttttacagaccctagtcaaagggttaaaaaaattaagattgctttccatgtttgaaatttaccattgagagtcaatgaagttgctattttgagtttagcattgatattgtgaaaataagtgcaatttggatttcatgtttcttaatattcattcttgtttcacaaatgaatgattaaggaattatgcatcataaaggaacctaagtgaggtatatgatgagtgtattgtctttgcacacacatataggtatattctgaatacaagcttattcacattttgcttcctaatctttttgttgtacagggattcaggtttcttattcttacaacatgattgtttatatgtgaagcacatcttgctgttgccttatttttgatgcttttattcatgacaagaattgtcaatataagaatgtatatcttttttgcaaccaatttaataaaggagttgaaagaaagagtgcactgattgttaatattacaaagaaaccttcatcttaaaggcattgagcagtgcaaaacagaactgattttcaaagcaggaaatagaatcacagttttaatgtttggcaaggaataaaacagacagaaatgctttggagactatggttctatccttttttcttccgacctcatttagaaaatacttatttgcaactcttagattgttttcctgatataccttttctcattaattgtctaattaactagcaaagattcctgcttaagagtgtgtgctctgcaaccaaactgcctagatttgaatcttgtctacaccacttactagctgtttaact

SEQ ID NO: 623 - DNA, 5880 bp, Homo sapiens
agacgccgcccaggacgcagccgccgccgccgccgctcctctgccactggctctgcgccccagcccggctctgctgcagcggcagggaggaagagccgccgcagcgcgactcgggagccccgggccacagcctggcctccggagccacccacaggcctccccgggcggcgcccacgctcctaccgcccggacgcgcggatcctccgccggcaccgcagccacctgctcccggcccagaggcgacgacacgatgcgctgcgcgctggcgctctcggcgctgctgctactgttgtcaacgccgccgctgctgccgtcgtcgccgtcgccgtcgccgtcgccctcccagaatgcaacccagactactacggactcatctaacaaaacagcaccgactccagcatccagtgtcaccatcatggctacagatacagcccagcagagcacagtccccacttccaaggccaacgaaatcttggcctcggtcaaggcgaccacccttggtgtatccagtgactcaccggggactacaaccctggctcagcaagtctcaggcccagtcaacactaccgtggctagaggaggcggctcaggcaaccctactaccaccatcgagagccccaagagcacaaaaagtgcagacaccactacagttgcaacctccacagccacagctaaacctaacaccacaagcagccagaatggagcagaagatacaacaaactctggggggaaaagcagccacagtgtgaccacagacctcacatccactaaggcagaacatctgacgacccctcaccctacaagtccacttagcccccgacaacccacttcgacgcatcctgtggccaccccaacaagctcgggacatgaccatcttatgaaaatttcaagcagttcaagcactgtggctatccctggctacaccttcacaagcccggggatgaccaccaccctaccgtcatcggttatctcgcaaagaactcaacagacctccagtcagatgccagccagctctacggccccttcctcccaggagacagtgcagcccacgagcccggcaacggcattgagaacacctaccctgccagagaccatgagctccagccccacagcagcatcaactacccaccgataccccaaaacaccttctcccactgtggctcatgagagtaactgggcaaagtgtgaggatcttgagacacagacacagagtgagaagcagctcgtcctgaacctcacaggaaacaccctctgtgcagggggcgcttcggatgagaaattgatctcactgatatgccgagcagtcaaagccaccttcaacccggcccaagataagtgcggcatacggctggcatctgttccaggaagtcagaccgtggtcgtcaaagaaatcactattcacactaagctccctgccaaggatgtgtacgagcggctgaaggacaaatgggatgaactaaaggaggcaggggtcagtgacatgaagctaggggaccaggggccaccggaggaggccgaggaccgcttcagcatgcccctcatcatcaccatcgtctgcatggcatcattcctgctcctcgtggcggccctctatggctgctgccaccagcgcctctcccagaggaaggaccagcagcggctaacagaggagctgcagacagtggagaatggttaccatgacaacccaacactggaagtgatggagacctcttctgagatgcaggagaagaaggtggtcagcctcaacggggagctgggggacagctggatcgtccctctggacaacctgaccaaggacgacctggatgaggaggaagacacacacctctagtccggtctgccggtggcctccagcagcaccacagagctccagaccaaccaccccaagtgccgtttggatggggaagggaaagactggggagggagagtgaactccgaggggtgtcccctcccaatccccccagggccttaatttttcccttttcaacctgaacaaatcacattctgtccagattcctcttgtaaaataacccactagtgcctgagctcagtgctgctggatgatgagggagatcaagaaaaagccacgtaagggactttatagatgaactagtggaatcccttcattctgcagtgagattgccgagacctgaagagggtaagtgacttgcccaaggtcagagccacttggtgacagagccaggatgagaacaaagattccatttgcaccatgccacactgctgtgttcacatgtgccttccgtccagagcagtcccgggcaggggtgaaactccagcaggtggctgggctggaaaggagggcagggctacatcctggctcggtgggatctgacgacctgaaagtccagctcccaagttttccttctcctaccccagcctcgtgtacccatcttcccaccctctatgttcttacccctccctacactcagtgtttgttcccacttactctgtcctggggcctctgggattagcacaggttattcataaccttgaaccccttgttctggattcggattttctcacatttgcttcgtgagatgggggcttaacccacacaggtctccgtgcgtgaaccaggtctgcttaggggacctgcgtgcaggtgaggagagaaggggacactcgagtccaggctggtatctcagggcagctgatgaggggtcagcaggaacactggcccattgcccctggcactccttgcagaggccacccacgatcttctttgggcttccatttccaccagggactaaaatctgctgtagctagtgagagcagcgtgttccttttgttgttcactgctcagctgatgggagtgattccctgagacccagtatgaaagagcagtggctgcaggagaggccttcccggggccccccatcagcgatgtgtcttcagagacaatccattaaagcagccaggaaggacaggctttcccctgtatatcataggaaactcagggacatttcaagttgctgagagttttgttatagttgttttctaacccagccctccactgccaaaggccaaaagctcagacagttggcagacgtccagttagctcatctcactcactctgattctcctgtgccacaggaaaagagggcctggaaagcgcagtgcatgctgggtgcatgaagggcagcctgggggacagactgttgtgggaacgtcccactgtcctggcctggagctaggccttgctgttcctcttctctgtgagcctagtggggctgctgcggttctcttgcagtttctggtggcatctcaggggaacacaaagctatgtctattccccaatataggacttttatgggctcggcagttagctgccatgtagaaggctcctaagcagtgggcatggtgaggtttcatctgattgagaagggggaatcctgtgtggaatgttgaactttcgccatggtctccatcgttctgggcgtaaattccctgggatcaagtaggaaaatgggcagaactgcttaggggaatgaaattgccatttttcgggtgaaacgccacacctccagggtcttaagagtcaggctccggctgtagtagctctgatgaaataggctatccactcgggatggcttactttttaaaagggtagggggaggggctggggaagatctgtcctgcaccatctgcctaattccttcctcacagtctgtagccatctgatatcctaggggaaaaggaaggccaggggttcacatagggccccagcgagtttcccaggagttagagggatgcgaggctaacaagttccaaaaacatctgccccgatgctctagtgtttggaggtgggcaggatggagaacagtgcctgtttgggggaaaacaggaaatcttgttaggcttgagtgaggtgtttgcttccttcttgcccagcgctgggttctctccacccagtaggttttctgttgtggtcccgtgggagaggccagactggattattcctcctttgctgatcctgggtcacacttcaccagccagggcttttgacggagacagcaaataggcctctgcaaatcaatcaaaggctgcaaccctatggcctcttggagacagatgatgactggcaaggactagagagcaggagtgcctggccaggtcggtcctgactctcctgactctccatcgctctgtccaaggagaacccggagaggctctgggctgattcagaggttactgctttatattcgtccaaactgtgttagtctaggcttaggacagcttcagaatctgacaccttgccttgctcttgccaccaggacacctatgtcaacaggccaaacagccatgcatctataaaggtcatcatcttctgccacctttactgggttctaaatgctctctgataattcagagagcattgggtctgggaagaggtaagaggaacactagaagctcagcatgacttaaacaggttgtagcaaagacagtttatcatcagctctttcagtggtaaactgtggtttccccaagctgcacaggaggccagaaaccacaagtatgatgactaggaagcctactgtcatgagagtggggagacaggcagcaaagcttatgaaggaggtacagaatattctttgcgttgtaagacagaatacgggtttaatctagtctaggcaccagatttttttcccgcttgataaggaaagctagcagaaagtttatttaaaccacttcttgagctttatcttttttgacaatatactggagaaactttgaagaacaagttcaaactgatacatatacacatatttttttgataatgtaaatacagtgaccatgttaacctaccctgcactgctttaagtgaacatactttgaaaaagcattatgttagctgagtgatggccaagttttttctctggacagtaatgtaaatgtcttactggaaatgacaagtttttgcttgatttttttttttaaacaaaaaatgaaatataacaagacaaacttatgataaagtatttgtcttgtagatcaggtgttttgttttgtttttttaattttaaaatgcaaccctgccccctccccagcaaagtcacagctccatttcagtaaaggttggagtcaatatgctctggttggcaggcaaccctgtagtcatggagaaaggtatttcaagatctagtccaatctttttctagagaaaaagataatctgaagctcacaaagatgaagtgacttcctcaaaatcacatggttcaggacagaaacaagattaaaacctggatccacagactgtgcgcctcagaaggaataatcggtaaattaagaattgctactcgaaggtgccagaatgacacaaaggacagaattcctttcccagttgttaccctagcaaggctagggagggcatgaacacaaacataagaactggtcttctacactttctctgaatcatttaggtttaagatgtaagtgaacaattctttctttctgccaagaaacaaagttttggatgagcttttatatatggaacttactccaacaggactgagggaccaaggaaacatgatgggggaggcagagagggcaagagtaaaactgtagcatagcttttgtcacggtcactagctgatccctcaggtctgctgcaaacacagcatggaggacacagatgactctttggtgttggtctttttgtctgcagtgaatgttcaacagtttgcccaggaactgggggatcatatatgtcttagtggacaggggtctgaagtacactggaatttactgagaaacttgtttgtaaaaactatagttaataattattgcattttcttacaaaaatatattttggaaaattgtatactgtcaattaaagtgtttttgtgtaaactggttcaa

SEQ ID NO: 624 - DNA, 5869 bp, Homo sapiens
aaacgccgcccaggacgcagccgccgccgccgccgctcctctgccactggctctgcgccccagcccggctctgctgcagcggcagggaggaagagccgccgcagcgcgactcgggagccccgggccacagcctggcctccggagccacccacaggcctccccgggcggcgcccacgctcctaccgcccggacgcgcggatcctccgccggcaccgcagccacctgctcccggcccagaggcgacgacacgatgcgctgcgcgctggcgctctcggcgctgctgctactgttgtcaacgccgccgctgctgccgtcgtcgccgtcgccgtcgccgtcgccgtcgccctcccagaatgcaacccagactactacggactcatctaacaaaacagcaccgactccagcatccagtgtcaccatcatggctacagatacagcccagcagagcacagtccccacttccaaggccaacgaaatcttggcctcggtcaaggcgaccacccttggtgtatccagtgactcaccggggactacaaccctggctcagcaagtctcaggcccagtcaacactaccgtggctagaggaggcggctcaggcaaccctactaccaccatcgagagccccaagagcacaaaaagtgcagacaccactacagttgcaacctccacagccacagctaaacctaacaccacaagcagccagaatggagcagaagatacaacaaactctggggggaaaagcagccacagtgtgaccacagacctcacatccactaaggcagaacatctgacgacccctcaccctacaagtccacttagcccccgacaacccactttgacgcatcctgtggccaccccaacaagctcgggacatgaccatcttatgaaaatttcaagcagttcaagcactgtggctatccctggctacaccttcacaagcccggggatgaccaccaccctaccgtcatcggttatctcgcaaagaactcaacagacctccagtcagatgccagccagctctacggccccttcctcccaggagacagtgcagcccacgagcccggcaacggcattgagaacacctaccctgccagagaccatgagctccagccccacagcagcatcaactacccaccgataccccaaaacaccttctcccactgtggctcatgagagtaactgggcaaagtgtgaggatcttgagacacagacacagagtgagaagcagctcgtcctgaacctcacaggaaacaccctctgtgcagggggcgcttcggatgagaaattgatctcactgatatgccgagcagtcaaagccaccttcaacccggcccaagataagtgcggcatacggctggcatctgttccaggaagtcagaccgtggtcgtcaaagaaatcactattcacactaagctccctgccaaggatgtgtacgagcggctgaaggacaaatgggatgaactaaaggaggcaggggtcagtgacatgaagctaggggaccaggggccaccggaggaggccgaggaccgcttcagcatgcccctcatcatcaccatcgtctgcatggcgtcattcctgctcctcgtggcggccctctatggctgctgccaccagcgcctctcccagaggaaggaccagcagcggctaacagaggagctgcagacagtggagaatggttaccatgacaacccaacactggaagtgatggagacctcttctgagatgcaggagaagaaggtggtcagcctcaacggggagctgggggacagctggatcgtccctctggacaacctgaccaaggacgacctggatgaggaggaagacacacacctctagtccggtctgccggtggcctccagcagcaccacagagctccagaccaaccaccccaagtgccgtttggatggggaagggaaagactggggagggagagtgaactccgaggggtgtcccctcccaatccccccagggccttaatttttcccttttcaacctgaacaaatcacattctgtccagattcctcttgtaaaataacccactagtgcctgagctcagtgctgctggatgatgagggagatcaagaaaaagccacgtaagggactttatagatgaactagtggaatcccttcattctgcagtgagattgccgagacctgaagagggtaagtgacttgcccaaggtcagagccacttggtgacagagccaggatgagaacaaagattccatttgcaccatgccacactgctgtgttcacatgtgccttccgtccagagcagtcccgggcaggggtgaaactccagcaggtggctgggctggaaaggagggcagggctacatcctggctcggtgggatctgacgacctgaaagtccagctcccaagttttccttctcctaccccagcctcgtgtacccatcttcccaccctctatgttcttacccctccctacactcagtgtttgttcccacttactctgtcctggggcctctgggattagcacaggttattcataaccttgaaccccttgttctggattcggattttctcacatttgcttcgtgagatgggggcttaacccacacaggtctccgtgcgtgaaccaggtctgcttaggggacctgcgtgcaggtgaggagagaaggggacactcgagtccaggctggtatctcagggcagctgatgaggggtcagcaggaacactggcccattgcccctggcactccttgcagaggccacccacgatcttctttgggcttccatttccaccagggactaaaatctgctgtagctagtgagagcagcgtgttccttttgttgttcactgctcagctgatgggagtgattccctgagacccagtatgaaagagcagtggctgcaggagaggccttcccggggccccccatcagcgatgtgtcttcagagacaatccattaaagcagccaggaaggacaggctttcccctgtatatcataggaaactcagggacatttcaagttgctgagagttttgttatagttgttttctaacccagccctccactgccaaaggccaaaagctcagacagttggcagacgtccagttagctcatctcactcactctgattctcctgtgccacaggaaaagagggcctggaaagcgcagtgcatgctgggtgcatgaagggcagcctgggggacagactgttgtgggaacgtcccactgtcctggcctggagctaggccttgctgttcctcttctctgtgagcctagtggggctgctgcggttctcttgcagtttctggtggcatctcaggggaacacaaaagctatgtctattccccaatataggacttttatgggctcggcagttagctgccatgtagaaggctcctaagcagtgggcatggtgaggtttcatctgattgagaagggggaatcctgtgtggaatgttgaactttcgccatggtctccatcgttctgggcgtaaattccctgggatcaagtaggaaaatgggcagaactgcttaggggaatgaaattgccatttttcgggtgaaacgccacacctccagggtcttaagagtcaggctccggctgtagtagctctgatgaaataggctatccactcgggatggcttactttttaaaagggtagggggaggggctggggaagatctgtcctgcaccatctgcctaattccttcctcacagtctgtagccatctgatatcctagggggaaaaggaaggccaggggttcacatagggccccagcgagtttcccaggagttagagggatgcgaggctaacaagttccaaaaacatctgccccgatgctctagtgtttggaggtgggcaggatggagaacagtgcctgtttgggggaaaacaggaaatcttgttaggcttgagtgaggtgtttgcttccttcttgcccagcgctgggttctctccacccagtaggttttctgttgtggtcccgtgggagaggccagactggattattcctcctttgctgatcctgggtcacacttcaccagccagggcttttgacggagacagcaaataggcctctgcaaatcaatcaaaggctgcaaccctatggcctcttggagacagatgatgactggcaaggactagagagcaggagtgcctggccaggtcggtcctgactctcctgactctccatcgctctgtccaaggagaacccggagaggctctgggctgattcagaggttactgctttatattcgtccaaactgtgttagtctaggcttaggacagcttcagaatctgacaccttgccttgctcttgccaccaggacacctatgtcaacaggccaaacagccatgcatctataaaggtcatcatcttctgccacctttactgggttctaaatgctctctgataattcagagagcattgggtctgggaagaggtaagaggaacactagaagctcagcatgacttaaacaggttgtagcaaagacagtttatcatcaactctttcagtggtaaactgtggtttccccaagctgcacaggaggccagaaaccacaagtatgatgactaggaagcctactgtcatgagagtggggagacaggcagcaaagcttatgaaggaggtacagaatattctttgcgttgtaagacagaatacgggtttaatctagtctaggcrccagatttttttcccgcttgataaggaaagctagcagaaagtttatttaaaccacttcttgagctttatcttttttgacaatatactggagaaactttgaagaacaagttcaaactgatacatatacacatatttttttgataatgtaaatacagtgaccatgttaacctaccctgcactgctttaagtgaacatactttgaaaaagcattatgttagctgagtgatggccaagttttttctctggacaggaatgtaaatgtcttactggaaatgacaagtttttgcttgatttttttttttaaacaaaaaatgaaatataacaagacaaacttatgataaagtatttgtcttgtagatcaggtgttttgttttgtttttttaattttaaaatgcaaccctgccccctccccagcaaagtcacagctccatttcagtaaaggttggagtcaatatgctctggttggcaggcaaccctgtagtcatggagaaaggtatttcaagatctagtccaatctttttctagagaaaaagataatctgaagctcacaaagatgaagtgacttcctcaaaatcacatggttcaggacagaaacaagattaaaacctggatccacagactgtgcgcctcagaaggaataatcggtaaattaagaattgctactcgaaggtgccagaatgacacaaaggacagaattcctttcccagttgttaccctagcaaggctagggagggcatgaacacaaacataagaactggtcttctcacactttctctgaatcatttaggtttaagatgtaagtgaacaattctttctttctgccaagaaacaaagttttggatgagcttttatatatggaacttactccaacaggactgagggaccaaggaaacatgatgggggaggcaagagagggcaaagagtaaaactgtagcatagcttttgtcacggtcactagctgatccctcaggtctgctgcaaacacagcatggaggacacagatgactctttggtgttggtctttttgtctgcagtgaatgttcaacagtttgcccaggaactgggggatcatatatgtcttagtggacaggggtctgaagtacactggaatttactgagaaacttgtttgtaaaaactatagttaataattattgcattttcttacaaaaatatattttggaaaattgtatactgtcaattaaagt

SEQ ID NO: 625 - DNA, 1260 bp, Homo sapiens
tctatgagaggccatacacggtggacctgactagggtgtggcttccctgaggagctgaagttgcccagaggcccagagaaggggagctgagcacgtttgaaccactgaacctgctctggacctcgcctccttcccttcggtgcctcccagcatcctatcctctttaaagagcaggggttcagggaagttccctggatggtgattcgcaggggcagctcccctctcacctgccgcgatgactaccccgccccatctcaaacacacaagctcacgcatgcgggactggagcccttgaggacatgtggcccaaagacaggaggtacaggggctcagtgcgtgcagtggaatgaactgggcttcatctctggaagggtaaggggccatcttccgggttcaccgccgcatccccacccccggcacagcgcctcctggcgactaacatcggtgacttagtgaaaggactaagaaagacccgaggcgaggccggaacaggccgatttctagccgccaagtggagaacaggttggagcggtgcgccgggcttagcggcggttgctggaggaacgggcggagtcgcccagggtcctgccctgcgggggtcgagccgaggcaggcggtgacttccccactcggggcggagccgcagcctcgcgggggcggggcctggcgccggcggtggcgtcacaaaaggcgggaccacagtggtgtccgagaagtcaggcacgtagctcagcggcggccgcggcgcgtgcgtctgtgcctctgcgcgggtctcctggtccttctgccatcatgccgatgttcatcgtaaacaccaacgtgccccgcgcctccgtgccggacgggttcctctccgagctcacccagcagctggcgcaggccaccggcaagcccccccagtacatcgcggtgcacgtggtcccggaccagctcatggccttcggcggctccagcgagccgtgcgcgctctgcagcctgcacagcatcggcaagatcggcggcgcgcagaaccgctcctacagcaagctgctgtgcggcctgctggccgagcgcctgcgcatcagcccggacagggtctacatcaactattacgacatgaacgcggccaatgtgggctggaacaactccaccttcgcctaagagccgcagggacccacgctgtctgcgctggctccacccgggaacccgccgcacgctgtgttctaggcccgcccaccccaaccttctggtggggagaaataaacggtttagagactagga

SEQ ID NO: 626 - DNA, 4103 bp, Homo sapiens
ctcacagcccgaaactgcaaggagctcctctgcccggcctctctttactcctcctctctgcccctcagctcgctcatctttcttcccgccccctctcttttccttctttggttctttgaagtgatgagctagcgcaaccacaaaccatacattccttttgtagaaaaacccgtgcctcgaatgaggcgagactcagagaggacccaggcgcggggcggacccctccaattccttcctcgcgcccccgaaagagcggcgcaccagcagccgaactgccggcgcccaggctccctggtccggccgggatgcggccggtacccgctccccgccgggaacaacctctccactcttcctgcagggagctggtgccagccgacagccgcgccagggccgctccgggtaccagggtcggatcgggtgacgtcgcgaacttgcgcctggccgccaagccggcctccaggctgaagaaggacccgccccggccttgacccgggccccgcccctccagccggggcaccgagccccggccctagctgctcgcccctactcgccggcactcgcccggctcgcccgctttcgcacccagttcacgcgccacagctatgtgtccccgagccgcgcgggcgcccgcgacgctactcctcgccctgggcgcggtgctgtggcctgcggctggcgcctgggagcttacgattttgcacaccaacgacgtgcacagccggctggagcagaccagcgaggactccagcaagtgcgtcaacgccagccgctgcatgggtggcgtggctcggctcttcaccaaggttcagcagatccgccgcgccgaacccaacgtgctgctgctggacgccggcgaccagtaccagggcactatctggttcaccgtgtacaagggcgccgaggtggcgcacttcatgaacgccctgcgctacgatgccatggcactgggaaatcatgaatttgataatggtgtggaaggactgatcgagccactcctcaaagaggccaaatttccaattctgagtgcaaacattaaagcaaaggggccactagcatctcaaatatcaggactttatttgccatataaagttcttcctgttggtgatgaagttgtgggaatcgttggatacacttccaaagaaaccccttttctctcaaatccagggacaaatttagtgtttgaagatgaaatcactgcattacaacctgaagtagataagttaaaaactctaaatgtgaacaaaattattgcactgggacattcgggttttgaaatggataaactcatcgctcagaaagtgaggggtgtggacgtcgtggtgggaggacactccaacacatttctttacacaggcaatccaccttccaaagaggtgcctgctgggaagtacccattcatagtcacttctgatgatgggcggaaggttcctgtagtccaggcctatgcttttggcaaatacctaggctatctgaagatcgagtttgatgaaagaggaaacgtcatctcttcccatggaaatcccattcttctaaacagcagcattcctgaagatccaagcataaaagcagacattaacaaatggaggataaaattggataattattctacccaggaattagggaaaacaattgtctatctggatggctcctctcaatcatgccgctttagagaatgcaacatgggcaacctgatttgtgatgcaatgattaacaacaacctgagacacgcggatgaaatgttctggaaccacgtatccatgtgcattttaaatggaggtggtatccggtcgcccattgatgaacgcaacaatggcacaattacctgggagaacctggctgctgtattgccctttggaggcacatttgacctagtccagttaaaaggttccaccctgaagaaggcctttgagcatagcgtgcaccgctacggccagtccactggagagttcctgcaggtgggcggaatccatgtggtgtatgatctttcccgaaaacctggagacagagtagtcaaattagatgttctttgcaccaagtgtcgagtgcccagttatgaccctctcaaaatggacgaggtatataaggtgatcctcccaaacttcctggccaatggtggagatgggttccagatgataaaagatgaattattaagacatgactctggtgaccaagatatcaacgtggtttctacatatatctccaaaatgaaagtaatttatccagcagttgaaggtcggatcaagttttccacaggaagtcactgccatggaagcttttctttaatatttctttcactttgggcagtgatctttgttttataccaatagccaaaaattctccttgcctttaatgtgtgaaactgcattttttcaagtgagattcaaatctgccttttaggacctggctttgtgacagcaaaaaccatctttacaggctcctagaagctgaaggttagagcattataaaatgaagagacagacatgattactcagggtcagcaacctagtgagttagaaaaaaaattaacatagggccctataaggagaaagccaactatgttaagtttacgtgtccaaattttaatgaaattttactaacaattttaaaccatatttttcttcttcatatccatttctaatccatcaaacagcttatgtttacataaaattttatcattcacaaggaagttttaagcacactgtctcatttgatatccacaacttatttttggtaggaaagagagatgtttttcccacctgtcagatgaaaaaactgaagctcaaaaagggttgacttgaccatacagctaatgctgacagatccaagacctagacctaggtcttttgaactcaagtccagcattctcaactatatcaagttactgttcagaatacttaatatctcctctcttcataattatcaatagccccaagctcatggatgacaaatctctgctttatttcttgtctctattttttcactttatagctcctgttataatagcaagtttaatggtataaacacaggataccatcctctcttgcaacacccatgtgcctttgatgagtcaggtagcaagctgtagtagataatgagaaaggccagaggctgcaaaagacagtcaaaggacacgagagaaaggaaggggaagaacaggactccaggactgttttatattatagaaaagcaagagctaaagagcatttacacatgttaaacagatacttgttaagcatagtgcctgacacacggcattagctgttattttatgagattccatcagctctgcctctgtcctctttcttctaacatgaaggtatcatgagaagagaaccttctaacataagctgtaattctaaacctgcacttgtccctctccagcaagaggctagcactgaattcattctactcatactacacacccagttatggaatgtccagagttctcgaagaaaataaatgactttaggaagaggtatacattttttaagtcgctctgcctccaaatctgaacagtcactgtaaatcattcttaagcccagatatgagaacttctgctggaaagtgggaccctctgagtgggtggtcagaaaatacccatgctgatgaaatgacctatgcccaaagaacaaatacttaacgtgggagtggaaccacatgagcctgctcagctctgcataagtaattcaagaaatgggaggcttcaccttaaaaacagtgtgcaaatggcagctagaggttttgataggaagtatgtttgtttcttagtgtttacaaatattaagtactcttgatacaaaatatacttttaaacttcataacctttttataaaagttgttgcagcaaaataatagcctcggttctatgcatatatggattagctataaaaaatgtcaataagattgtacaaggaaaattagagaaaggcacatttagggtttattttttacacttggccagtaaaatagggtaaatcctattagaattttttaaagaactttttttaagtttcctaaatctgtgtgtgtattgtgaagtggtataagaaatgactttgaaccactttgcaattgtagattcccaacaataaaattgaagataa

SEQ ID NO: 627 - DNA, 3547 bp, Homo sapiens
gcactcgcccggctcgcccgctttcgcacccagttcacgcgccacagctatgtgtccccgagccgcgcgggcgcccgcgacgctactcctcgccctgggcgcggtgctgtggcctgcggctggcgcctgggagcttacgattttgcacaccaacgacgtgcacagccggctggagcagaccagcgaggactccagcaagtgcgtcaacgccagccgctgcatgggtggcgtggctcggctcttcaccaaggttcagcagatccgccgcgccgaacccaacgtgctgctgctggacgccggcgaccagtaccagggcactatctggttcaccgtgtacaagggcgccgaggtggcgcacttcatgaacgccctgcgctacgatgccatggcactgggaaatcatgaatttgataatggtgtggaaggactgatcgagccactcctcaaagaggccaaatttccaattctgagtgcaaacattaaagcaaaggggccactagcatctcaaatatcaggactttatttgccatataaagttcttcctgttggtgatgaagttgtgggaatcgttggatacacttccaaagaaaccccttttctctcaaatccagggacaaatttagtgtttgaagatgaaatcactgcattacaacctgaagtagataagttaaaaactctaaatgtgaacaaaattattgcactgggacattcgggttttgaaatggataaactcatcgctcagaaagtgaggggtgtggacgtcgtggtgggaggacactccaacacatttctttacacaggcaatccaccttccaaagaggtgcctgctgggaagtacccattcatagtcacttctgatgatgggcggaaggttcctgtagtccaggcctatgcttttggcaaatacctaggctatctgaagatcgagtttgatgaaagaggaaacgtcatctcttcccatggaaatcccattcttctaaacagcagcattcctgaagatccaagcataaaagcagacattaacaaatggaggataaaattggataattattctacccaggaattagggaaaacaattgtctatctggatggctcctctcaatcatgccgctttagagaatgcaacatgggcaacctgatttgtgatgcaatgattaacaacaacctgagacacacggatgaaatgttctggaaccacgtatccatgtgcattttaaatggaggtggtatccggtcgcccattgatgaacgcaacaatggcacaattacctgggagaacctggctgctgtattgccctttggaggcacatttgacctagtccagttaaaaggttccaccctgaagaaggcctttgagcatagcgtgcaccgctacggccagtccactggagagttcctgcaggtgggcggaatccatgtggtgtatgatctttcccgaaaacctggagacagagtagtcaaattagatgttctttgcaccaagtgtcgagtgcccagttatgaccctctcaaaatggacgaggtatataaggtgatcctcccaaacttcctggccaatggtggagatgggttccagatgataaaagatgaattattaagacatgactctggtgaccaagatatcaacgtggtttctacatatatctccaaaatgaaagtaatttatccagcagttgaaggtcggatcaagttttccacaggaagtcactgccatggaagcttttctttaatatttctttcactttgggcagtgatctttgttttataccaatagccaaaaattctccttgcctttaatgtgtgaaactgcattttttcaagtgagattcaaatctgccttttaggacctggctttgtgacagcaaaaaccatctttacaggctcctagaagctgaaggttagagcattataaaatgaagagacagacatgattactcagggtcagcaacctagtgagttagaaaaaaaattaacatagggccctataaggagaaagccaactatgttaagtttacgtgtccaaattttaatgaaattttactaacaattttaaaccatatttttcttcttcatatccatttctaatccatcaaacagcttatgtttacataaaattttatcattcacaaggaagttttaagcacactgtctcatttgatatccacaacttatttttggtaggaaagagagatgtttttcccacctgtcagatgaaaaaactgaagctcaaaaagggttgacttgaccatacagctaatgctgacagatccaagacctagacctaggtcttttgaactcaagtccagcattctcaactatatcaagttactgttcagaatacttaatatctcctctcttcataattatcaatagccccaagctcatggatgacaaatctctgctttatttcttgtctctattttttcactttatagctcctgttataatagcaagtttaatggtataaacacaggataccatcctctcttgcaacacccatgtgcctttgatgagtcaggtagcaagctgtagtagataatgagaaaggccagaggctgcaaagacagtcaaaggacacgagagaaaggaaggggaagaacaggactccaggactgttttatattatagaaaagcaagagctaaagagcatttacacatgttaaacagatacttgttaagcatagtgcctgacacacggcattagctgttattttatgagattccatcagctctgcctctgtcctctttcttctaacatgaaggtatcatgagaagagaaccttctaacataagctgtaattctaaacctgcacttgtccctctccagcaagaggctagcactgaattcattctactcatactacacacccagttatggaatgtccagagttctcgaagaaaataaatgactttaggaagaggtatacattttttaagtcgctctgcctccaaatctgaacagtcactgtaaatcattcttaagcccagatatgagaacttctgctggaaagtgggaccctctgagtgggtggtcagaaaatacccatgctgatgaaatgacctatgcccaaagaacaaatacttaacgtgggagtggaaccacatgagcctgctcagctctgcataagtaattcaagaaatgggaggcttcaccttaaaaacagtgtgcaaatggcagctagaggttttgataggaagtatgtttgtttcttagtgtttacaaatattaagtactcttgatacaaaatatacttttaaacttcataacctttttataaaagttgttgcagcaaaataatagcctcggttctatgcatatatggattgctataaaaaatgtcaataagattgtacaaggaaaattagagaaagtcacatttagggtttattttttacacttggccagtaaaatagggtaaatcctattagaaattttttaaagaactttttttaagtttcctaaatctgtgtgtgtattgtgaagtggtataagaaatgactttgaaccactttgcaattgtagattcccaacaataaaattgaagat

SEQ ID NO: 628 - DNA, 1635 bp, Homo sapiens
aaatggagaagctgtgctaatagaggggggccagaaatccccactctagaatgctgtagaatgttgggagacacccaggatgtgagccagggactttctggaagtgtttgttctggccccacccgaccccaggcagtccccagctgtctgcacagtcggatggggagggggcttgcacagagttggagccagaggagagagctggctcatcccctacggtaggatggggaaacctcacagaccacattgtcacccggcctcagctctccgccccggcgctcagagggtaactctcacccacctcgtccgcttctctgaaccagagtgacccaggctgcgctccgccccgctctcctaccccgagttggcacggaggtatagcgccagaggggggccccaggcgccccgaggtcttgcccttgcggctttccctttgcgggggtgggcgccttcttccgggtaggggccacgtggccctggccgggcggggggctcggcccaccccgcgccgggcccagtgactcaggccgcagctgttaccgcgtcacatgagggaggccggcggccactcggcgggggaggggaccgtggctggagcccggggcggggccgcgcggcaggcggggcgggagccggggggcgcagctagagagccccggagccgcggcgggagaggaacgcgcagccagccttgggaagcccaggcccggcagccatggcggtggaaggaggaatgaaatgtgtgaagttcttgctctacgtcctcctgctggccttttgcgcctgtgcagtgggactgattgccgtgggtgtcggggcacagcttgtcctgagtcagaccataatccagggggctacccctggctctctgttgccagtggtcatcatcgcagtgggtgtcttcctcttcctggtggcttttgtgggctgctgcggggcctgcaaggagaactattgtcttatgatcacgtttgccatctttctgtctcttatcatgttggtggaggtggccgcagccattgctggctatgtgtttagagataaggtgatgtcagagtttaataacaacttccggcagcagatggagaattacccgaaaaacaaccacactgcttcgatcctggacaggatgcaggcagattttaagtgctgtggggctgctaactacacagattgggagaaaatcccttccatgtcgaagaaccgagtccccgactcctgctgcattaatgttactgtgggctgtgggattaatttcaacgagaaggcgatccataaggagggctgtgtggagaagattgggggctggctgaggaaaaatgtgctggtggtagctgcagcagcccttggaattgcttttgtcgaggttttgggaattgtctttgcctgctgcctcgtgaagagtatcagaagtggctacgaggtgatgtaggggtctggtctcctcagcctcctcatctgggggagtggaatagtatcctccaggtttttcaattaaacggattattttttcagaccgaaaagagatggtctgagtttgtcttagagtgatgcttgattccttcctttccttactgatgttccctgtcctctgggaccttaatgcatgtgtacttcgaggtctattttgggggg

SEQ ID NO: 629 - DNA, 1357 bp, Homo sapiens
gtggcttcggggaagggcttcctccccttttctcagactaggatccctggaaaatggagaagctgtgctaatagaggggggccagaaatccccactctagaatgctgtagaatgttgggagacacccaggatgtgagccagggactttctggaagtgtttgttctggccccacccgaccccaggcagtccccagctgtctgcacagtcggatggggagggggcttgcacagagttggagccagaggagagagctggctcatcccctacggtaggatggggaaacctcacagaccacattgtcacccggcctcagctctccgccccggcgctcagagggtaactctcacccacctcgtccgcttctctgaaccagagtgacccaggctgcgctccgccccgctctcctaccccgagttggcacggaggcccggcagccatggcggtggaaggaggaatgaaatgtgtgaagttcttgctctacgtcctcctgctggccttttgcgcctgtgcagtgggactgattgccgtgggtgtcggggcacagcttgtcctgagtcagaccataatccagggggctacccctggctctctgttgccagtggtcatcatcgcagtgggtgtcttcctcttcctggtggcttttgtgggctgctgcggggcctgcaaggagaactattgtcttatgatcacgtttgccatctttctgtctcttatcatgttggtggaggtggccgcagccattgctggctatgtgtttagagataaggtgatgtcagagtttaataacaacttccggcagcagatggagaattacccgaaaaacaaccacactgcttcgatcctggacaggatgcaggcagattttaagtgctgtggggctgctaactacacagattgggagaaaatcccttccatgtcgaagaaccgagtccccgactcctgctgcattaatgttactgtgggctgtgggattaatttcaacgagaaggcgatccataaggagggctgtgtggagaagattgggggctggctgaggaaaaatgtgctggtggtagctgcagcagcccttggaattgcttttgtcgaggttttgggaattgtctttgcctgctgcctcgtgaagagtatcagaagtggctacgaggtgatgtaggggtctggtctcctcagcctcctcatctgggggagtggaatagtatcctccaggtttttcaattaaacggattattttttcagaccgaaaagagatggtctgagtttgtcttagagtgatgcttgattccttcctttccttactgatgttccctgtcctctgggaccttaatgcatgtgtacttcgaggtctattttgggggg

SEQ ID NO: 630 - DNA, 1670 bp, Homo sapiens
gtggcttcggggaagggcttcctccccttttctcagactaggatccctggaaaatggagaagctgtgctaatagaggggggccagaaatccccactctagaatgctgtagaatgttgggagacacccaggatgtgagccagggactttctggaagtgtttgttctggccccacccgaccccaggcagtccccagctgtctgcacagtcggatggggagggggcttgcacagagttggagccagaggagagagctggctcatcccctacggtaggatggggaaacctcacagaccacattgtcacccggcctcagctctccgccccggcgctcagagggtaactctcacccacctcgtccgcttctctgaaccagagtgacccaggctgcgctccgccccgctctcctaccccgagttggcacggaggcccggcagccatggcggtggaaggaggaatgaaatgtgtgaagttcttgctctacgtcctcctgctggccttttgcgcctgtgcagtgggactgattgccgtgggtgtcggggcacagcttgtcctgagtcagaccataatccagggggctacccctggctctctgttgccagtggtcatcatcgcagtgggtgtcttcctcttcctggtggcttttgtgggctgctgcggggcctgcaaggagaactattgtcttatgatcacgtttgccatctttctgtctcttatcatgttggtggaggtggccgcagccattgctggctatgtgtttagagataaggtgatgtcagagtttaataacaacttccggcagcagatggagaattacccgaaaaacaaccacactgcttcgatcctggacaggatgcaggcagattttaagtgctgtggggctgctaactacacagattgggagaaaatcccttccatgtcgaagaaccgagtccccgactcctgctgcattaatgttactgtgggctgtgggattaatttcaacgagaaggcgatccataaggagggctgtgtggagaagattgggggctggctgaggaaaaatgtgctggtggtagctgcagcagcccttggaattgcttttgtcgaggttttgggaattgtctttgcctgctgcctcgtgaagagtatcagaagtggctacgaggtgatgtaggggtctggtctcctcagcctcctcatctgggggagtggaatatcagtgtccttagcaggagaatttatgtgaatattgccttttcttccatggaagccacccagcctggcccagaaccctcatcacctgctcttctcccccaagaaatatgaagaccattcccagtacagacactgaattgcaaccttactccccttcagaaaataagggaaatgtattaaagtgccctttgatggccactccccgacgtgcagctgtagatgtgaggcagttccctggcgccccactgtgggtgctagctgttttgcagggactgaacaggccagagaccgtgagcatgtcggtttggagtagttggcacttaaatggggtcagccttccactgggcacatttctgcccaccttctttttattttttaaacaatacacttttgttagtgcttattttgtggcaggcaccaggcagtaccagggtgggggcagaaataaatcaaagtccttgtccttgaaaaacaa

SEQ ID NO: 631 - DNA, 4639 bp, Homo sapiens
gcttagactgggtacctcttgcccttgcagatgctggatacttatggctgctctaatggtttctttttgtctatctttgaacctttattccagagatccagttgtcatcggtatccaggaagctctcctcttcctcctcctgacgtctactactacagttgctggttgttgctaaggttgctgccatggtaacatgcacatcctgtttacaccttcatctgggcaagttggtctaagctaggaacctacctaccctggacaactactatcatcaccacctggggacaccaatcatcgtgacacggagtccaccttccactcagttcccccatcctcttcctcctctcgctgccagacttcatacggaagaaaggatctagacttcggacggctactcgggagcttattgcacaagatatattcaatctattccctcactgggcccccagagaagcaagaagtaggaagaagttgagacagggaggcaggagacactggtcagttgaagggaaacgctacatcttctctggttgaggggcttggtaacagcaggcaaaatgacgaacccatcagaccgtgtcttgcctgccaactcgatggccgagagccgtgaaggggactttggctgcacagtaatggaactgaggaagctcatggagctgcgttcgagggatgcactgacccagattaatgtccactatggaggtgtacagaatctctgcagtagactgaaaacctcccctgtggaaggtctgtctgggaaccctgcagatctggagaaacgtaggcaggtgtttggacacaacgtgatcccccccaaaaagcccaagactttcttagaattagtgtgggaagctcttcaagatgtcacgcttatcatcctggagattgcagccatcatctccctggtcctgtccttttatcgccctgctggtgaagaaaatgaactgtgtggtcaagtcgcaactaccccagaagatgaaaatgaggcacaagctggctggattgagggggcagccatccttttctcagtgatcatcgtggtgttagtgactgcctttaatgattggagcaaagagaagcaattccgggggctgcagtgccgcattgaacaggagcaaaagttctccatcatccgaaacggtcaactcatccagctccctgtggctgagattgtggttggtgatattgcccaagtcaaatacggtgatctgctgcctgcagatggaatcctgatccaagggaatgatctgaagattgatgagagctctctgacaggggaatctgaccatgtcaagaagtccctggacaaagaccccatgttgctctcagggacccatgtcatggaaggttctggccggatggtggtgacagctgttggtgtcaactctcagactggaatcatccttactctcttgggggtcaatgaggatgacgaaggggagaaaaagaagaaaggtaaaaaacaaggagtccctgaaaatcgcaacaaagcaaagacccaagacggagtggccctggaaatccagccactcaacagccaggagggaatcgacaatgaggaaaaggacaagaaggcagtcaaggtgcctaaaaaggagaagtcagtgctgcagggcaagctgactcgcctggctgttcagattgggaaagccggtctgctcatgtctgctctcacggttttcatcctgattctatactttgtgattgacaactttgtgataaatcgcagaccatggctccctgagtgtactcccatctacatccagtactttgtcaagttcttcatcatcggcatcactgtactggtggtggctgtgccagaggggctgcctctggctgtcaccatctcactggcctactctgtgaagaaaatgatgaaagacaataacctagtacggcacttggatgcttgtgagaccatgggcaacgccaccgccatctgctctgataagacaggcacgttgaccatgaaccgcatgactgtggtacaagcttatattgggggcatccattaccgtcaaatcccaagccctgatgtcttcctgcccaaagtcctggacctcattgtcaatggcatttctatcaacagtgcttatacctccaagattctgcctccagagaaggagggaggcctgcctcggcaggtgggcaacaagaccgagtgtgctctgctaggctttgtcacagatctgaagcaggattatcaggctgtgcgtaatgaagtgcccgaggagaagctctacaaggtgtacacctttaactcagtgcgcaagtcaatgagcaccgtcatcaggaatcccaacggtggcttccgtatgtacagcaagggcgcctctgagatcatcttgcgcaagtgtaatcgaatcctggaccggaaaggggaagcagtgccattcaagaataaagacagagatgatatggtacgcactgtcatcgagcccatggcctgtgatggactccggactatctgcatagcttaccgggacttcgatgacacagagccctcttgggacaatgagaatgagatcctcaccgaactgacctgtatcgcggtggtgggcattgaggaccctgtgcgcccagaggtgccagatgctattgccaaatgcaaacaagctggcattactgtcagaatggtgacaggtgacaacatcaacacagcccgggccattgccaccaaatgtggcattctgacacctggggatgacttcctgtgcttagaaggcaaagaattcaaccggctcatccgcaacgagaaaggcgaggtagagcaagaaaagctggacaagatctggcctaagcttcgggtcctggcgcgatcttctcccactgacaagcacaccctggtgaaaggcataattgacagcactgttggggaacaccggcaggtcgtggctgtcactggtgatggcacaaatgacgggcctgctctgaagaaagcggatgttggttttgccatgggcatcgcaggcacagatgtagcaaaggaggcttcagacatcatcctaacagatgacaacttcaccagcattgtgaaggcagtgatgtggggacgaaatgtctatgacagcatctccaagttcctgcagttccagctcactgtcaatgtggtggccgtgattgtagccttcactggagcctgtatcactcaggattccccattgaaagctgtgcagatgttgtgggttaatctgatcatggacacttttgcttcattggccctggccacagagccccctacggaatctctgttgaagcggcgcccctatggccgaaataagcctctgatctcacgcactatgatgaagaacatcttgggccatgcattctatcagctcattgtcatctttatccttgtctttgcgggtgagaaattctttgatattgatagtgggaggaaggcacctctacattcaccacccagccagcactataccattgtttttaacaccttcgtgctgatgcagctcttcaatgaaatcaactcccgaaagatccatggagagaagaacgtcttttcaggcatctaccgcaacattatcttctgctctgtagtcttgggcacattcatctgccagattttcatcgtggaatttgggggtaaacccttcagttgtacaagcctcagcctgtctcagtggctgtggtgtctcttcattgggattggagaacttctgtggggccagttcatctccgcaatacctacccgatccctgaagttcctgaaggaggctgggcatggcaccaccaaagaggagatcaccaaggatgccgagggactggatgagattgaccatgctgagatggagctgcgccgaggccagatcctctggttccggggcctgaaccgtatccagactcagatcaaagtggtcaaagcgttccatagttccctccacgaaagcattcagaaaccctacaaccaaaagtccatccacagcttcatgacccaccctgaattcgccatagaggaggagttgccacgaacaccactcctggatgaggaagaggaggaaaatcctgacaaggcttctaagtttgggactagggtgctcctgttggatggtgaggtcactccatatgccaatacaaacaacaatgcggtggattgcaaccaagtgcagctcccccagtcggacagctctctacagagcctagagacatcagtttgaattttctttctctgactctcatccctattttacctatttccattttcgtctatcccatctatgaggtgatgatgggacttttcattgtcacgtcagctgctgtgttaacagcagtgtgtgtgaagtgaacctctacctgaccatgaagaggcaagagcacagacttacaaggatttcaacttaagcttgacttggggtttgtagcgggacccagtcaaaccccattcaggtcatggtagaatctactccttggtagtcacttgtcatttttaaagaaatgatgacaatcctcttggcatcaccccaccccacattctccccgatgttcctctcctgaattctggattttgtcctacaagtctgtgccatttataagctaagttgagggttcagagggagacaaatatccccaagtgaaatatgttgcggtagagatggaatgtataaaatccgccagtagtgtg

SEQ ID NO: 632 - DNA, 4671 bp, Homo sapiens
gcttagactgggtacctcttgcccttgcagatgctggatacttatggctgctctaatggtttctttttgtctatctttgaacctttattccagagatccagttgtcatcggtatccaggaagctctcctcttcctcctcctgacgtctactactacagttgctggttgttgctaaggttgctgccatggtaacatgcacatcctgtttacaccttcatctgggcaagttggtctaagctaggaacctacctaccctggacaactactatcatcaccacctggggacaccaatcatcgtgacacggagtccaccttccactcagttcccccatcctcttcctcctctcgctgccagacttcatacggaagaaaggatctagacttcggacggctactcgggagcttattgcacaagatatattcaatctattccctcactgggcccccagagaagcaagaagtaggaagaagttgagacagggaggcaggagacactggtcagttgaagggaaacgctacatcttctctggttgaggggcttggtaacagcaggcaaaatgacgaacccatcagaccgtgtcttgcctgccaactcgatggccgagagccgtgaaggggactttggctgcacagtaatggaactgaggaagctcatggagctgcgttcgagggatgcactgacccagattaatgtccactatggaggtgtacagaatctctgcagtagactgaaaacctcccctgtggaaggtctgtctgggaaccctgcagatctggagaaacgtaggcaggtgtttggacacaacgtgatcccccccaaaaagcccaagactttcttagaattagtgtgggaagctcttcaagatgtcacgcttatcatcctggagattgcagccatcatctccctggtcctgtccttttatcgccctgctggtgaagaaaatgaactgtgtggtcaagtcgcaactaccccagaagatgaaaatgaggcacaagctggctggattgagggggcagccatccttttctcagtgatcatcgtggtgttagtgactgcctttaatgattggagcaaagagaagcaattccgggggctgcagtgccgcattgaacaggagcaaaagttctccatcatccgaaacggtcaactcatccagctccctgtggctgagattgtggttggtgatattgcccaagtcaaatacggtgatctgctgcctgcagatggaatcctgatccaagggaatgatctgaagattgatgagagctctctgacaggggaatctgaccatgtcaagaagtccctggacaaagaccccatgttgctctcagggacccatgtcatggaaggttctggccggatggtggtgacagctgttggtgtcaactctcagactggaatcatccttactctcttgggggtcaatgaggatgacgaaggggagaaaaagaagaaaggtaaaaaacaaggagtccctgaaaatcgcaacaaagcaaagacccaagacggagtggccctggaaatccagccactcaacagccaggagggaatcgacaatgaggaaaaggacaagaaggcagtcaaggtgcctaaaaaggagaagtcagtgctgcagggcaagctgactcgcctggctgttcagattgggaaagccggtctgctcatgtctgctctcacggttttcatcctgattctatactttgtgattgacaactttgtgataaatcgcagaccatggctccctgagtgtactcccatctacatccagtactttgtcaagttcttcatcatcggcatcactgtactggtggtggctgtgccagaggggctgcctctggctgtcaccatctcactggcctactctgtgaagaaaatgatgaaagacaataacctagtacggcacttggatgcttgtgagaccatgggcaacgccaccgccatctgctctgataagacaggcacgttgaccatgaaccgcatgactgtggtacaagcttatattgggggcatccattaccgtcaaatcccaagccctgatgtcttcctgcccaaagtcctggacctcattgtcaatggcatttctatcaacagtgcttatacctccaagattctgcctccagagaaggagggaggcctgcctcggcaggtgggcaacaagaccgagtgtgctctgctaggctttgtcacagatctgaagcaggattatcaggctgtgcgtaatgaagtgcccgaggagaagctctacaaggtgtacacctttaactcagtgcgcaagtcaatgagcaccgtcatcaggaatcccaacggtggcttccgtatgtacagcaagggcgcctctgagatcatcttgcgcaagtgtaatcgaatcctggaccggaaaggggaagcagtgccattcaagaataaagacagagatgatatggtacgcactgtcatcgagcccatggcctgtgatggactccggactatctgcatagcttaccgggacttcgatgacacagagccctcttgggacaatgagaatgagatcctcaccgaactgacctgtatcgcggtggtgggcattgaggaccctgtgcgcccagaggtgccagatgctattgccaaatgcaaacaagctggcattactgtcagaatggtgacaggtgacaacatcaacacagcccgggccattgccaccaaatgtggcattctgacacctggggatgacttcctgtgcttagaaggcaaagaattcaaccggctcatccgcaacgagaaaggcgaggtagagcaagaaaagctggacaagatctggcctaagcttcgggtcctggcgcgatcttctcccactgacaagcacaccctggtgaaaggcataattgacagcactgttggggaacaccggcaggtcgtggctgtcactggtgatggcacaaatgacgggcctgctctgaagaaagcggatgttggttttgccatgggcatcgcaggcacagatgtagcaaaggaggcttcagacatcatcctaacagatgacaacttcaccagcattgtgaaggcagtgatgtggggacgaaatgtctatgacagcatctccaagttcctgcagttccagctcactgtcaatgtggtggccgtgattgtagccttcactggagcctgtatcactcaggattccccattgaaagctgtgcagatgttgtgggttaatctgatcatggacacttttgcttcattggccctggccacagagccccctacggaatctctgttgaagcggcgcccctatggccgaaataagcctctgatctcacgcactatgatgaagaacatcttgggccatgcattctatcagctcattgtcatctttatccttgtctttgcgggtgagaaattctttgatattgatagtgggaggaaggcacctctacattcaccacccagccagcactataccattgtttttaacaccttcgtgctgatgcagctcttcaatgaaatcaactcccgaaagatccatggagagaagaacgtcttttcaggcatctaccgcaacattatcttctgctctgtagtcttgggcacattcatctgccagattttcatcgtggaatttgggggtaaacccttcagttgtacaagcctcagcctgtctcagtggctgtggtgtctcttcattgggattggagaacttctgtggggccagttcatctccgcaatacctacccgatccctgaagttcctgaaggaggctgggcatggcaccaccaaagaggagatcaccaaggatgccgagggactggatgagattgaccatgctgagatggagctgcgccgaggccagatcctctggttccggggcctgaaccgtatccagactcagatcaaagtggtcaaagcgttccatagttccctccacgaaagcattcagaaaccctacaaccaaaagtccatccacagcttcatgacccaccctgaattcgccatagaggaggagttgccacgaacaccactcctggatgaggaagaggaggaaaatcctgacaaggcttctaagtttgggactagggtgctcctgttggatggtgaggtcactccatatgccaatacaaacaacaatgcggtggattgcaaccaagtgcagctcccccagtcggacagctctctacagagcctagagacatcagtttgaattttctttctctgactctcatccctattttacctatttccattttcgtctatcccatctatgaggtgatgatgggacttttcattgtcacgtcagctgctgtgttaacagcagtgtgtgtgaagtgaacctctacctgaccatgaagaggcaagagcacagacttacaaggatttcaacttaagcttgacttggggtttgtagcgggacccagtcaaaccccattcaggtcatggtagaatctactccttggtagtcacttgtcatttttaaagaaatgatgacaatcctcttggcatcaccccaccccacattctccccgatgttcctctcctgaattctggattttgtcctacaagtctgtgccatttataagctaagttgagggttcagagggagacaaatatccccgattgtttttcaatttttcccactttgaaaacttacacctaaaggcctgtaggcctctaactctttctgccctttcattcaaacc

SEQ ID NO: 633 - DNA, 4350 bp, Homo sapiens
gcttagactgggtacctcttgcccttgcagatgctggatacttatggctgctctaatggtttctttttgtctatctttgaacctttattccagagatccagttgtcatcggtatccaggaagctctcctcttcctcctcctgacgtctactactacagttgctggttgttgctaaggttgctgccatggtaacatgcacatcctgtttacaccttcatctgggcaagttggtctaagctaggaacctacctaccctggacaactactatcatcaccacctggggacaccaatcatcgtgacacggagtccaccttccactcagttcccccatcctcttcctcctctcgctgccagacttcatacggaagaaaggatctagacttcggacggctactcgggagcttattgcacaagatatattcaatctattccctcactgggcccccagagaagcaagaagtaggaagaagttgagacagggaggcaggagacactggtcagttgaagggaaacgctacatcttctctggttgaggggcttggtaacagcaggcaaaatgacgaacccatcagaccgtgtcttgcctgccaactcgatggccgagagccgtgaaggggactttggctgcacagtaatggaactgaggaagctcatggagctgcgttcgagggatgcactgacccagattaatgtccactatggaggtgtacagaatctctgcagtagactgaaaacctcccctgtggaaggtctgtctgggaaccctgcagatctggagaaacgtaggcaggtgtttggacacaacgtgatcccccccaaaaagcccaagactttcttagaattagtgtgggaagctcttcaagatgtcacgcttatcatcctggagattgcagccatcatctccctggtcctgtccttttatcgccctgctggtgaagaaaatgaactgtgtggtcaagtcgcaactaccccagaagatgaaaatgaggcacaagctggctggattgagggggcagccatccttttctcagtgatcatcgtggtgttagtgactgcctttaatgattggagcaaagagaagcaattccgggggctgcagtgccgcattgaacaggagcaaaagttctccatcatccgaaacggtcaactcatccagctccctgtggctgagattgtggttggtgatattgcccaagtcaaatacggtgatctgctgcctgcagatggaatcctgatccaagggaatgatctgaagattgatgagagctctctgacaggggaatctgaccatgtcaagaagtccctggacaaagaccccatgttgctctcagggacccatgtcatggaaggttctggccggatggtggtgacagctgttggtgtcaactctcagactggaatcatccttactctcttgggggtcaatgaggatgacgaaggggagaaaaagaagaaaggtaaaaaacaaggagtccctgaaaatcgcaacaaagcaaagacccaagacggagtggccctggaaatccagccactcaacagccaggagggaatcgacaatgaggaaaaggacaagaaggcagtcaaggtgcctaaaaaggagaagtcagtgctgcagggcaagctgactcgcctggctgttcagattgggaaagccggtctgctcatgtctgctctcacggttttcatcctgattctatactttgtgattgacaactttgtgataaatcgcagaccatggctccctgagtgtactcccatctacatccagtactttgtcaagttcttcatcatcggcatcactgtactggtggtggctgtgccagaggggctgcctctggctgtcaccatctcactggcctactctgtgaagaaaatgatgaaagacaataacctagtacggcacttggatgcttgtgagaccatgggcaacgccaccgccatctgctctgataagacaggcacgttgaccatgaaccgcatgactgtggtacaagcttatattgggggcatccattaccgtcaaatcccaagccctgatgtcttcctgcccaaagtcctggacctcattgtcaatggcatttctatcaacagtgcttatacctccaagattctgcctccagagaaggagggaggcctgcctcggcaggtgggcaacaagaccgagtgtgctctgctaggctttgtcacagatctgaagcaggattatcaggctgtgcgtaatgaagtgcccgaggagaagctctacaaggtgtacacctttaactcagtgcgcaagtcaatgagcaccgtcatcaggaatcccaacggtggcttccgtatgtacagcaagggcgcctctgagatcatcttgcgcaagtgtaatcgaatcctggaccggaaaggggaagcagtgccattcaagaataaagacagagatgatatggtacgcactgtcatcgagcccatggcctgtgatggactccggactatctgcatagcttaccgggacttcgatgacacagagccctcttgggacaatgagaatgagatcctcaccgaactgacctgtatcgcggtggtgggcattgaggaccctgtgcgcccagaggtgccagatgctattgccaaatgcaaacaagctggcattactgtcagaatggtgacaggtgacaacatcaacacagcccgggccattgccaccaaatgtggcattctgacacctggggatgacttcctgtgcttagaaggcaaagaattcaaccggctcatccgcaacgagaaaggcgaggtagagcaagaaaagctggacaagatctggcctaagcttcgggtcctggcgcgatcttctcccactgacaagcacaccctggtgaaaggcataattgacagcactgttggggaacaccggcaggtcgtggctgtcactggtgatggcacaaatgacgggcctgctctgaagaaagcggatgttggttttgccatgggcatcgcaggcacagatgtagcaaaggaggcttcagacatcatcctaacagatgacaacttcaccagcattgtgaaggcagtgatgtggggacgaaatgtctatgacagcatctccaagttcctgcagttccagctcactgtcaatgtggtggccgtgattgtagccttcactggagcctgtatcactcaggattccccattgaaagctgtgcagatgttgtgggttaatctgatcatggacacttttgcttcattggccctggccacagagccccctacggaatctctgttgaagcggcgcccctatggccgaaataagcctctgatctcacgcactatgatgaagaacatcttgggccatgcattctatcagctcattgtcatctttatccttgtctttgcgggtgagaaattctttgatattgatagtgggaggaaggcacctctacattcaccacccagccagcactataccattgtttttaacaccttcgtgctgatgcagctcttcaatgaaatcaactcccgaaagatccatggagagaagaacgtcttttcaggcatctaccgcaacattatcttctgctctgtagtcttgggcacattcatctgccagattttcatcgtggaatttgggggtaaacccttcagttgtacaagcctcagcctgtctcagtggctgtggtgtctcttcattgggattggagaacttctgtggggccagttcatctccgcaatacctacccgatccctgaagttcctgaaggaggctgggcatggcaccaccaaagaggagatcaccaaggatgccgagggactggatgagattgaccatgctgagatggagctgcgccgaggccagatcctctggttccggggcctgaaccgtatccagactcagatcgacgtaattaacacattccagacgggagcctcttttaagggagtcctaaggcgacagaacatgggtcaacaccttgatgtaaaacttgttcctagttcatcctatgtagcagttgcaccagtcaaatcttcccccaccacttctgttcctgctgtttcatctcctcctatgggcaatcaaagtggtcaaagcgttccatagttccctccacgaaagcattcagaaaccctacaaccaaaagtccatccacagcttcatgacccaccctgaattcgccatagaggaggagttgccacgaacaccactcctggatgaggaagaggaggaaaatcctgacaaggcttctaagtttgggactagggtgctcctgttggatggtgaggtcactccatatgccaatacaaacaacaatgcggtggattgcaaccaagtgcagctcccccagtcggacagctctctacagagcctagagacatcagtt

SEQ ID NO: 634 - DNA, 4280 bp, Homo sapiens
gcttagactgggtacctcttgcccttgcagatgctggatacttatggctgctctaatggtttctttttgtctatctttgaacctttattccagagatccagttgtcatcggtatccaggaagctctcctcttcctcctcctgacgtctactactacagttgctggttgttgctaaggttgctgccatggtaacatgcacatcctgtttacaccttcatctgggcaagttggtctaagctaggaacctacctaccctggacaactactatcatcaccacctggggacaccaatcatcgtgacacggagtccaccttccactcagttcccccatcctcttcctcctctcgctgccagacttcatacggaagaaaggatctagacttcggacggctactcgggagcttattgcacaagatatattcaatctattccctcactgggcccccagagaagcaagaagtaggaagaagttgagacagggaggcaggagacactggtcagttgaagggaaacgctacatcttctctggttgaggggcttggtaacagcaggcaaaatgacgaacccatcagaccgtgtcttgcctgccaactcgatggccgagagccgtgaaggggactttggctgcacagtaatggaactgaggaagctcatggagctgcgttcgagggatgcactgacccagattaatgtccactatggaggtgtacagaatctctgcagtagactgaaaacctcccctgtggaaggtctgtctgggaaccctgcagatctggagaaacgtaggcaggtgtttggacacaacgtgatcccccccaaaaagcccaagactttcttagaattagtgtgggaagctcttcaagatgtcacgcttatcatcctggagattgcagccatcatctccctggtcctgtccttttatcgccctgctggtgaagaaaatgaactgtgtggtcaagtcgcaactaccccagaagatgaaaatgaggcacaagctggctggattgagggggcagccatccttttctcagtgatcatcgtggtgttagtgactgcctttaatgattggagcaaagagaagcaattccgggggctgcagtgccgcattgaacaggagcaaaagttctccatcatccgaaacggtcaactcatccagctccctgtggctgagattgtggttggtgatattgcccaagtcaaatacggtgatctgctgcctgcagatggaatcctgatccaagggaatgatctgaagattgatgagagctctctgacaggggaatctgaccatgtcaagaagtccctggacaaagaccccatgttgctctcagggacccatgtcatggaaggttctggccggatggtggtgacagctgttggtgtcaactctcagactggaatcatccttactctcttgggggtcaatgaggatgacgaaggggagaaaaagaagaaaggtaaaaaacaaggagtccctgaaaatcgcaacaaagcaaagacccaagacggagtggccctggaaatccagccactcaacagccaggagggaatcgacaatgaggaaaaggacaagaaggcagtcaaggtgcctaaaaaggagaagtcagtgctgcagggcaagctgactcgcctggctgttcagattgggaaagccggtctgctcatgtctgctctcacggttttcatcctgattctatactttgtgattgacaactttgtgataaatcgcagaccatggctccctgagtgtactcccatctacatccagtactttgtcaagttcttcatcatcggcatcactgtactggtggtggctgtgccagaggggctgcctctggctgtcaccatctcactggcctactctgtgaagaaaatgatgaaagacaataacctagtacggcacttggatgcttgtgagaccatgggcaacgccaccgccatctgctctgataagacaggcacgttgaccatgaaccgcatgactgtggtacaagcttatattgggggcatccattaccgtcaaatcccaagccctgatgtcttcctgcccaaagtcctggacctcattgtcaatggcatttctatcaacagtgcttatacctccaagattctgcctccagagaaggagggaggcctgcctcggcaggtgggcaacaagaccgagtgtgctctgctaggctttgtcacagatctgaagcaggattatcaggctgtgcgtaatgaagtgcccgaggagaagctctacaaggtgtacacctttaactcagtgcgcaagtcaatgagcaccgtcatcaggaatcccaacggtggcttccgtatgtacagcaagggcgcctctgagatcatcttgcgcaagtgtaatcgaatcctggaccggaaaggggaagcagtgccattcaagaataaagacagagatgatatggtacgcactgtcatcgagcccatggcctgtgatggactccggactatctgcatagcttaccgggacttcgatgacacagagccctcttgggacaatgagaatgagatcctcaccgaactgacctgtatcgcggtggtgggcattgaggaccctgtgcgcccagaggtgccagatgctattgccaaatgcaaacaagctggcattactgtcagaatggtgacaggtgacaacatcaacacagcccgggccattgccaccaaatgtggcattctgacacctggggatgacttcctgtgcttagaaggcaaagaattcaaccggctcatccgcaacgagaaaggcgaggtagagcaagaaaagctggacaagatctggcctaagcttcgggtcctggcgcgatcttctcccactgacaagcacaccctggtgaaaggcataattgacagcactgttggggaacaccggcaggtcgtggctgtcactggtgatggcacaaatgacgggcctgctctgaagaaagcggatgttggttttgccatgggcatcgcaggcacagatgtagcaaaggaggcttcagacatcatcctaacagatgacaacttcaccagcattgtgaaggcagtgatgtggggacgaaatgtctatgacagcatctccaagttcctgcagttccagctcactgtcaatgtggtggccgtgattgtagccttcactggagcctgtatcactcaggattccccattgaaagctgtgcagatgttgtgggttaatctgatcatggacacttttgcttcattggccctggccacagagccccctacggaatctctgttgaagcggcgcccctatggccgaaataagcctctgatctcacgcactatgatgaagaacatcttgggccatgcattctatcagctcattgtcatctttatccttgtctttgcgggtgagaaattctttgatattgatagtgggaggaaggcacctctacattcaccacccagccagcactataccattgtttttaacaccttcgtgctgatgcagctcttcaatgaaatcaactcccgaaagatccatggagagaagaacgtcttttcaggcatctaccgcaacattatcttctgctctgtagtcttgggcacattcatctgccagattttcatcgtggaatttgggggtaaacccttcagttgtacaagcctcagcctgtctcagtggctgtggtgtctcttcattgggattggagaacttctgtggggccagttcatctccgcaatacctacccgatccctgaagttcctgaaggaggctgggcatggcaccaccaaagaggagatcaccaaggatgccgagggactggatgagattgaccatgctgagatggagctgcgccgaggccagatcctctggttccggggcctgaaccgtatccagactcagatcgacgtaattaacacattccagacgggagcctcttttaagggagtcctaaggcgacagaacatgggtcaacaccttgatgtaaaacttgttcctagttcatcctatatcaaagtggtcaaagcgttccatagttccctccacgaaagcattcagaaaccctacaaccaaaagtccatccacagcttcatgacccaccctgaattcgccatagaggaggagttgccacgaacaccactcctggatgaggaagaggaggaaaatcctgacaaggcttctaagtttgggactagggtgctcctgttggatggtgaggtcactccatatgccaatacaaacaacaatgcggtggattgcaaccaagtgcagctcccccagtcggacagctctctacagagcctagagacatcagtt

SEQ ID NO: 635 - DNA, 4384 bp, Homo sapiens
gtgtccacgcttagcagctttctcaccgccgccaaaccttgcctgggcactgggaccgtgggtggccgcctgtccctagctgtggctgagccaagattgcacttgtgagaaggcctgacaggcagcatgggcgacatggccaatagttccatcgagttccaccccaagccccagcagcagcgggatgtcccccaggctggaggctttgggtgcacgctggcggagctgcgcaccctcatggagctgcgaggggccgaggcgctgcagaagatcgaggaggcctacggggatgtcagcgggctctgccggaggctgaagacctcacccacagagggcctggcggacaacaccaatgacctggagaagcgcaggcagatctacgggcagaacttcatccccccaaagcaacccaagaccttcctgcagctggtgtgggaggccctgcaggacgtgaccctcatcatcctggaggtggctgccatcgtctctctgggcctctcgttctatgcgccgccaggagaggagagtgaagcctgtgggaatgtgtcgggaggcgcagaagatgagggcgaggccgaagctggctggatcgagggggctgccatcctgctgtccgtcatctgtgtggtgctggtcacggccttcaatgactggagcaaggagaagcagttccgaggcctgcagagccgaattgagcaggagcagaagttcacggtcatccggaacgggcagctcctccaggtccccgtggctgcgctggtggtgggggacattgcccaggtcaagtacggcgacctgctgccagccgacggcgtgctcatccaggccaatgacctcaagatcgacgagagctccctgacgggcgagtctgaccacgtgcgcaagtcagctgacaaagatcccatgctgctctcaggcactcatgtcatggaaggttctggaagaatggtggtgaccgccgttggcgtgaattcccagacaggcatcatcttcacgctgcttggagctggcggagaggaggaagagaagaaagataagaaagctaagaagcaggatggtgcagtggccatggagatgcagcccctgaagagcgcggagggtggggagatggaggagcgggagaagaagaaagccaacgcacccaaaaaggagaagtctgtccttcaggggaagctcacaaagctagccgtgcagatcgggaaagcagggctggtgatgtctgccatcaccgtcatcatcctggtcctctactttgtgattgagacgtttgtcgtggaaggccggacatggctggcagagtgcacgccggtctatgtacaatacttcgtgaagttcttcatcattggtgtcactgtgctggtcgtggctgtcccagagggcctgcctcttgctgtcaccatctccttagcttactctgtcaagaaaatgatgaaagacaacaacctggtgcgccacctggatgcctgcgagaccatgggcaacgccacagccatctgctccgacaagacgggcacgctcaccaccaaccgtatgaccgtggtccagtcctacctaggggacacccactacaaagagattccggcccccagcgccctgacccctaagatcctcgacctcctggtccatgccatctccatcaacagtgcctataccaccaaaatactacctcctgagaaggaaggcgccctcccacgccaggtgggcaataagacggagtgcgccctgctgggcttcgtcttggacctgaagcgggacttccagcccgtgcgcgagcagatcccggaagacaagctttacaaagtgtacaccttcaactcggtccgcaagtccatgagcacagtcatccgcatgcccgacggtggcttccgcctcttcagcaagggggcctcagagatcctcttgaaaaagtgcaccaacatcttgaacagcaatggcgaactccggggctttcggcctcgggaccgggacgacatggtgaggaagatcatcgagccgatggcttgcgatggcctccgcaccatctgcatcgcctaccgggacttctctgcaggccaggagcccgactgggacaacgagaatgaggtcgtgggtgacctcacctgcatagctgtcgtgggcattgaggaccctgtgcggcccgaggtccctgaagctatccgaaaatgccagcgtgctggcatcacagtccgcatggtgactggggacaacatcaacacggcccgggccatcgcagccaaatgcggcatcatccagcccggggaggacttcctgtgcctagaagggaaggagttcaaccggcggatccgcaatgagaaaggcgagatagaacaggagcggctggacaaggtgtggcccaagctgagggtgctggcccggtcgtctcccaccgacaagcacacactggtcaaagggattatcgacagcaccactggtgagcagcggcaggtggtggctgtgacaggggatggcaccaacgatgggccggccctcaagaaggcggacgtgggcttcgccatgggcatcgcagggaccgacgtggccaaggaggcctccgacatcatcctgaccgatgacaacttcaccagcatcgtcaaggcagtcatgtggggccgtaacgtctatgacagcatctccaagttcctgcagtttcaactgacggtcaatgtggtggctgtgatcgtggccttcacaggtgcctgcattactcaggactctcctctcaaagccgtgcagatgttgtgggtgaacttgatcatggacacatttgcctctctggccctggcgacggagccacccacagagtcgctgctgctgcggaagccgtacggccgcgacaagcccctcatctcccgcaccatgatgaagaacattctgggccacgccgtgtaccagctcgccatcatcttcaccctgctgtttgtcggggagctcttcttcgacatcgacagcgggaggaatgcgcccctgcactcgccaccctcagagcactacaccatcatcttcaacacgttcgtcatgatgcagctctttaacgagatcaacgcccgcaagatccacggcgagaggaacgtgttcgacggcatcttcagcaaccccatcttctgcaccatcgttttgggcactttcgggattcagattgtcatcgtccagtttggcgggaagcccttcagctgctccccactatccacagaacagtggctctggtgcctgtttgttggtgttggggagctggtctggggacaggtcattgccaccatccccaccagccagctcaagtgcctgaaggaagccgggcacgggcccgggaaggacgagatgaccgacgaggagctggccgaaggcgaggaagagatcgaccatgccgagcgggagctccgcaggggccagatcctctggttccggggcctgaaccggattcagacgcagatggaggtagtgagtaccttcaagagaagcggttcagttcagggtgctgtgcgccggcggtcttcggtcctcagccagcttcatgacgtaaccaatctttctacccctactcacgcaattctctctgctgccaatcctaccagtgctgctgggaatccgggtggtgaaagcgttccgtagctcgctctatgaaggcctggagaaaccagaatccaagacctccattcacaacttcatggccacgcccgagtttctgatcaatgactacacccacaacatcccgctcattgacgacacggacgtggacgagaacgaggagcgcctccgggcccccccgcccccgtcccccaaccagaacaacaacgccatagacagcggcatctacctgaccacgcatgtcaccaagtcagctacctcttcagtgttttcctccagtcccgggagcccgctccacagcgtggagacgtccctctaacaagaacttgtctcagcacatgcgcacacgcacactcggactcacacgaagtcacacgcacacatgcacgcacacacacatatggggacctgcacacctgcaaaacgagggaacaactaaggtggctgaagacctttctggcagggcatttgcaaggacccaaatccattcaacaagggtgcagcctgccacaggctcctcatccggactgaggaagacgaggacagggaggaggaaaaggaggaagaggaggacaaaaagggggaggagaaggttcttcgtccaaaggaggaaggagaagaagtagaaagtgcgaagagctgagttccccacctttttttctattgatgcttcttttttaacaaactacagttttaccgtgtgtttgccatttgagctgtgtggtgggcagggggctggtttgggtttatggggagcttttgttgcacccatgcaggggcaatcagatcagcatcttcatgc

SEQ ID NO: 636 - DNA, 4426 bp, Homo sapiens
gtgtccacgcttagcagctttctcaccgccgccaaaccttgcctgggcactgggaccgtgggtggccgcctgtccctagctgtggctgagccaagattgcacttgtgagaaggcctgacaggcagcatgggcgacatggccaatagttccatcgagttccaccccaagccccagcagcagcgggatgtcccccaggctggaggctttgggtgcacgctggcggagctgcgcaccctcatggagctgcgaggggccgaggcgctgcagaagatcgaggaggcctacggggatgtcagcgggctctgccggaggctgaagacctcacccacagagggcctggcggacaacaccaatgacctggagaagcgcaggcagatctacgggcagaacttcatccccccaaagcaacccaagaccttcctgcagctggtgtgggaggccctgcaggacgtgaccctcatcatcctggaggtggctgccatcgtctctctgggcctctcgttctatgcgccgccaggagaggagagtgaagcctgtgggaatgtgtcgggaggcgcagaagatgagggcgaggccgaagctggctggatcgagggggctgccatcctgctgtccgtcatctgtgtggtgctggtcacggccttcaatgactggagcaaggagaagcagttccgaggcctgcagagccgaattgagcaggagcagaagttcacggtcatccggaacgggcagctcctccaggtccccgtggctgcgctggtggtgggggacattgcccaggtcaagtacggcgacctgctgccagccgacggcgtgctcatccaggccaatgacctcaagatcgacgagagctccctgacgggcgagtctgaccacgtgcgcaagtcagctgacaaagatcccatgctgctctcaggcactcatgtcatggaaggttctggaagaatggtggtgaccgccgttggcgtgaattcccagacaggcatcatcttcacgctgcttggagctggcggagaggaggaagagaagaaagataagaaaggcaagcagcaggatggggccatggagagtagccagaccaaagctaagaagcaggatggtgcagtggccatggagatgcagcccctgaagagcgcggagggtggggagatggaggagcgggagaagaagaaagccaacgcacccaaaaaggagaagtctgtccttcaggggaagctcacaaagctagccgtgcagatcgggaaagcagggctggtgatgtctgccatcaccgtcatcatcctggtcctctactttgtgattgagacgtttgtcgtggaaggccggacatggctggcagagtgcacgccggtctatgtacaatacttcgtgaagttcttcatcattggtgtcactgtgctggtcgtggctgtcccagagggcctgcctcttgctgtcaccatctccttagcttactctgtcaagaaaatgatgaaagacaacaacctggtgcgccacctggatgcctgcgagaccatgggcaacgccacagccatctgctccgacaagacgggcacgctcaccaccaaccgtatgaccgtggtccagtcctacctaggggacacccactacaaagagattccggcccccagcgccctgacccctaagatcctcgacctcctggtccatgccatctccatcaacagtgcctataccaccaaaatactacctcctgagaaggaaggcgccctcccacgccaggtgggcaataagacggagtgcgccctgctgggcttcgtcttggacctgaagcgggacttccagcccgtgcgcgagcagatcccggaagacaagctttacaaagtgtacaccttcaactcggtccgcaagtccatgagcacagtcatccgcatgcccgacggtggcttccgcctcttcagcaagggggcctcagagatcctcttgaaaaagtgcaccaacatcttgaacagcaatggcgaactccggggctttcggcctcgggaccgggacgacatggtgaggaagatcatcgagccgatggcttgcgatggcctccgcaccatctgcatcgcctaccgggacttctctgcaggccaggagcccgactgggacaacgagaatgaggtcgtgggtgacctcacctgcatagctgtcgtgggcattgaggaccctgtgcggcccgaggtccctgaagctatccgaaaatgccagcgtgctggcatcacagtccgcatggtgactggggacaacatcaacacggcccgggccatcgcagccaaatgcggcatcatccagcccggggaggacttcctgtgcctagaagggaaggagttcaaccggcggatccgcaatgagaaaggcgagatagaacaggagcggctggacaaggtgtggcccaagctgagggtgctggcccggtcgtctcccaccgacaagcacacactggtcaaagggattatcgacagcaccactggtgagcagcggcaggtggtggctgtgacaggggatggcaccaacgatgggccggccctcaagaaggcggacgtgggcttcgccatgggcatcgcagggaccgacgtggccaaggaggcctccgacatcatcctgaccgatgacaacttcaccagcatcgtcaaggcagtcatgtggggccgtaacgtctatgacagcatctccaagttcctgcagtttcaactgacggtcaatgtggtggctgtgatcgtggccttcacaggtgcctgcattactcaggactctcctctcaaagccgtgcagatgttgtgggtgaacttgatcatggacacatttgcctctctggccctggcgacggagccacccacagagtcgctgctgctgcggaagccgtacggccgcgacaagcccctcatctcccgcaccatgatgaagaacattctgggccacgccgtgtaccagctcgccatcatcttcaccctgctgtttgtcggggagctcttcttcgacatcgacagcgggaggaatgcgcccctgcactcgccaccctcagagcactacaccatcatcttcaacacgttcgtcatgatgcagctctttaacgagatcaacgcccgcaagatccacggcgagaggaacgtgttcgacggcatcttcagcaaccccatcttctgcaccatcgttttgggcactttcgggattcagattgtcatcgtccagtttggcgggaagcccttcagctgctccccactatccacagaacagtggctctggtgcctgtttgttggtgttggggagctggtctggggacaggtcattgccaccatccccaccagccagctcaagtgcctgaaggaagccgggcacgggcccgggaaggacgagatgaccgacgaggagctggccgaaggcgaggaagagatcgaccatgccgagcgggagctccgcaggggccagatcctctggttccggggcctgaaccggattcagacgcagatggaggtagtgagtaccttcaagagaagcggttcagttcagggtgctgtgcgccggcggtcttcggtcctcagccagcttcatgacgtaaccaatctttctacccctactcacgcaattctctctgctgccaatcctaccagtgctgctgggaatccgggtggtgaaagcgttccgtagctcgctctatgaaggcctggagaaaccagaatccaagacctccattcacaacttcatggccacgcccgagtttctgatcaatgactacacccacaacatcccgctcattgacgacacggacgtggacgagaacgaggagcgcctccgggcccccccgcccccgtcccccaaccagaacaacaacgccatagacagcggcatctacctgaccacgcatgtcaccaagtcagctacctcttcagtgttttcctccagtcccgggagcccgctccacagcgtggagacgtccctctaacaagaacttgtctcagcacatgcgcacacgcacactcggactcacacgaagtcacacgcacacatgcacgcacacacacatatggggacctgcacacctgcaaaacgagggaacaactaaggtggctgaagacctttctggcagggcatttgcaaggacccaaatccattcaacaagggtgcagcctgccacaggctcctcatccggactgaggaagacgaggacagggaggaggaaaaggaggaagaggaggacaaaaagggggaggagaaggttcttcgtccaaaggaggaaggagaagaagtagaaagtgcgaagagctgagttccccacctttttttctattgatgcttcttttttaacaaactacagttttaccgtgtgtttgccatttgagctgtgtggtgggcagggggctggtttgggtttatggggagcttttgttgcacccatgcaggggcaatcagatcagcatcttcatgc

SEQ ID NO: 637 - DNA, 4272 bp, Homo sapiens
gtgtccacgcttagcagctttctcaccgccgccaaaccttgcctgggcactgggaccgtgggtggccgcctgtccctagctgtggctgagccaagattgcacttgtgagaaggcctgacaggcagcatgggcgacatggccaatagttccatcgagttccaccccaagccccagcagcagcgggatgtcccccaggctggaggctttgggtgcacgctggcggagctgcgcaccctcatggagctgcgaggggccgaggcgctgcagaagatcgaggaggcctacggggatgtcagcgggctctgccggaggctgaagacctcacccacagagggcctggcggacaacaccaatgacctggagaagcgcaggcagatctacgggcagaacttcatccccccaaagcaacccaagaccttcctgcagctggtgtgggaggccctgcaggacgtgaccctcatcatcctggaggtggctgccatcgtctctctgggcctctcgttctatgcgccgccaggagaggagagtgaagcctgtgggaatgtgtcgggaggcgcagaagatgagggcgaggccgaagctggctggatcgagggggctgccatcctgctgtccgtcatctgtgtggtgctggtcacggccttcaatgactggagcaaggagaagcagttccgaggcctgcagagccgaattgagcaggagcagaagttcacggtcatccggaacgggcagctcctccaggtccccgtggctgcgctggtggtgggggacattgcccaggtcaagtacggcgacctgctgccagccgacggcgtgctcatccaggccaatgacctcaagatcgacgagagctccctgacgggcgagtctgaccacgtgcgcaagtcagctgacaaagatcccatgctgctctcaggcactcatgtcatggaaggttctggaagaatggtggtgaccgccgttggcgtgaattcccagacaggcatcatcttcacgctgcttggagctggcggagaggaggaagagaagaaagataagaaaggcaagcagcaggatggggccatggagagtagccagaccaaagctaagaagcaggatggtgcagtggccatggagatgcagcccctgaagagcgcggagggtggggagatggaggagcgggagaagaagaaagccaacgcacccaaaaaggagaagtctgtccttcaggggaagctcacaaagctagccgtgcagatcgggaaagcagggctggtgatgtctgccatcaccgtcatcatcctggtcctctactttgtgattgagacgtttgtcgtggaaggccggacatggctggcagagtgcacgccggtctatgtacaatacttcgtgaagttcttcatcattggtgtcactgtgctggtcgtggctgtcccagagggcctgcctcttgctgtcaccatctccttagcttactctgtcaagaaaatgatgaaagacaacaacctggtgcgccacctggatgcctgcgagaccatgggcaacgccacagccatctgctccgacaagacgggcacgctcaccaccaaccgtatgaccgtggtccagtcctacctaggggacacccactacaaagagattccggcccccagcgccctgacccctaagatcctcgacctcctggtccatgccatctccatcaacagtgcctataccaccaaaatactacctcctgagaaggaaggcgccctcccacgccaggtgggcaataagacggagtgcgccctgctgggcttcgtcttggacctgaagcgggacttccagcccgtgcgcgagcagatcccggaagacaagctttacaaagtgtacaccttcaactcggtccgcaagtccatgagcacagtcatccgcatgcccgacggtggcttccgcctcttcagcaagggggcctcagagatcctcttgaaaaagtgcaccaacatcttgaacagcaatggcgaactccggggctttcggcctcgggaccgggacgacatggtgaggaagatcatcgagccgatggcttgcgatggcctccgcaccatctgcatcgcctaccgggacttctctgcaggccaggagcccgactgggacaacgagaatgaggtcgtgggtgacctcacctgcatagctgtcgtgggcattgaggaccctgtgcggcccgaggtccctgaagctatccgaaaatgccagcgtgctggcatcacagtccgcatggtgactggggacaacatcaacacggcccgggccatcgcagccaaatgcggcatcatccagcccggggaggacttcctgtgcctagaagggaaggagttcaaccggcggatccgcaatgagaaaggcgagatagaacaggagcggctggacaaggtgtggcccaagctgagggtgctggcccggtcgtctcccaccgacaagcacacactggtcaaagggattatcgacagcaccactggtgagcagcggcaggtggtggctgtgacaggggatggcaccaacgatgggccggccctcaagaaggcggacgtgggcttcgccatgggcatcgcagggaccgacgtggccaaggaggcctccgacatcatcctgaccgatgacaacttcaccagcatcgtcaaggcagtcatgtggggccgtaacgtctatgacagcatctccaagttcctgcagtttcaactgacggtcaatgtggtggctgtgatcgtggccttcacaggtgcctgcattactcaggactctcctctcaaagccgtgcagatgttgtgggtgaacttgatcatggacacatttgcctctctggccctggcgacggagccacccacagagtcgctgctgctgcggaagccgtacggccgcgacaagcccctcatctcccgcaccatgatgaagaacattctgggccacgccgtgtaccagctcgccatcatcttcaccctgctgtttgtcggggagctcttcttcgacatcgacagcgggaggaatgcgcccctgcactcgccaccctcagagcactacaccatcatcttcaacacgttcgtcatgatgcagctctttaacgagatcaacgcccgcaagatccacggcgagaggaacgtgttcgacggcatcttcagcaaccccatcttctgcaccatcgttttgggcactttcgggattcagattgtcatcgtccagtttggcgggaagcccttcagctgctccccactatccacagaacagtggctctggtgcctgtttgttggtgttggggagctggtctggggacaggtcattgccaccatccccaccagccagctcaagtgcctgaaggaagccgggcacgggcccgggaaggacgagatgaccgacgaggagctggccgaaggcgaggaagagatcgaccatgccgagcgggagctccgcaggggccagatcctctggttccggggcctgaaccggattcagacgcagatccgggtggtgaaagcgttccgtagctcgctctatgaaggcctggagaaaccagaatccaagacctccattcacaacttcatggccacgcccgagtttctgatcaatgactacacccacaacatcccgctcattgacgacacggacgtggacgagaacgaggagcgcctccgggcccccccgcccccgtcccccaaccagaacaacaacgccatagacagcggcatctacctgaccacgcatgtcaccaagtcagctacctcttcagtgttttcctccagtcccgggagcccgctccacagcgtggagacgtccctctaacaagaacttgtctcagcacatgcgcacacgcacactcggactcacacgaagtcacacgcacacatgcacgcacacacacatatggggacctgcacacctgcaaaacgagggaacaactaaggtggctgaagacctttctggcagggcatttgcaaggacccaaatccattcaacaagggtgcagcctgccacaggctcctcatccggactgaggaagacgaggacagggaggaggaaaaggaggaagaggaggacaaaaagggggaggagaaggttcttcgtccaaaggaggaaggagaagaagtagaaagtgcgaagagctgagttccccacctttttttctattgatgcttcttttttaacaaactacagttttaccgtgtgtttgccatttgagctgtgtggtgggcagggggctggtttgggtttatggggagcttttgttgcacccatgcaggggcaatcagatcagcatcttcatgc

SEQ ID NO: 638 - DNA, 5390 bp, Homo sapiens
aattcactaatgcattctgctctttttgagagcacagcttctcagatgtgctccttggagctggtgtgcagtgtcctgactgtaagatcaagtccaaacctgttttggaattgaggaaacttctcttttgatctcagcccttggtggtccaggtcttcatgctgctgtgggtgatattactggtcctggctcctgtcagtggacagtttgcaaggacacccaggcccattattttcctccagcctccatggaccacagtcttccaaggagagagagtgaccctcacttgcaagggatttcgcttctactcaccacagaaaacaaaatggtaccatcggtaccttgggaaagaaatactaagagaaaccccagacaatatccttgaggttcaggaatctggagagtacagatgccaggcccagggctcccctctcagtagccctgtgcacttggatttttcttcagcttcgctgatcctgcaagctccactttctgtgtttgaaggagactctgtggttctgaggtgccgggcaaaggcggaagtaacactgaataatactatttacaagaatgataatgtcctggcattccttaataaaagaactgacttccatattcctcatgcatgtctcaaggacaatggtgcatatcgctgtactggatataaggaaagttgttgccctgtttcttccaatacagtcaaaatccaagtccaagagccatttacacgtccagtgctgagagccagctccttccagcccatcagcgggaacccagtgaccctgacctgtgagacccagctctctctagagaggtcagatgtcccgctccggttccgcttcttcagagatgaccagaccctgggattaggctggagtctctccccgaatttccagattactgccatgtggagtaaagattcagggttctactggtgtaaggcagcaacaatgcctcacagcgtcatatctgacagcccgagatcctggatacaggtgcagatccctgcatctcatcctgtcctcactctcagccctgaaaaggctctgaattttgagggaaccaaggtgacacttcactgtgaaacccaggaagattctctgcgcactttgtacaggttttatcatgagggtgtccccctgaggcacaagtcagtccgctgtgaaaggggagcatccatcagcttctcactgactacagagaattcagggaactactactgcacagctgacaatggccttggcgccaagcccagtaaggctgtgagcctctcagtcactgttcccgtgtctcatcctgtcctcaacctcagctctcctgaggacctgatttttgagggagccaaggtgacacttcactgtgaagcccagagaggttcactccccatcctgtaccagtttcatcatgaggatgctgccctggagcgtaggtcggccaactctgcaggaggagtggccatcagcttctctctgactgcagagcattcagggaactactactgcacagctgacaatggctttggcccccagcgcagtaaggcggtgagcctctccgtcactgtccctgtgtctcatcctgtcctcaccctcagctctgctgaggccctgacttttgaaggagccactgtgacacttcactgtgaagtccagagaggttccccacaaatcctataccagttttatcatgaggacatgcccctgtggagcagctcaacaccctctgtgggaagagtgtccttcagcttctctctgactgaaggacattcagggaattactactgcacagctgacaatggctttggtccccagcgcagtgaagtggtgagcctttttgtcactgttccagtgtctcgccccatcctcaccctcagggttcccagggcccaggctgtggtgggggacctgctggagcttcactgtgaggccccgagaggctctcccccaatcctgtactggttttatcatgaggatgtcaccctggggagcagctcagccccctctggaggagaagcttctttcaacctctctctgactgcagaacattctggaaactactcatgtgaggccaacaatggcctagtggcccagcacagtgacacaatatcactcagtgttatagttccagtatctcgtcccatcctcaccttcagggctcccagggcccaggctgtggtgggggacctgctggagcttcactgtgaggccctgagaggctcctccccaatcctgtactggttttatcatgaagatgtcaccctgggtaagatctcagccccctctggaggaggggcctccttcaacctctctctgactacagaacattctggaatctactcctgtgaggcagacaatggtctggaggcccagcgcagtgagatggtgacactgaaagttgcagttccggtgtctcgcccggtcctcaccctcagggctcccgggacccatgctgcggtgggggacctgctggagcttcactgtgaggccctgagaggctctcccctgatcctgtaccggttttttcatgaggatgtcaccctaggaaataggtcgtccccctctggaggagcgtccttaaacctctctctgactgcagagcactctggaaactactcctgtgaggccgacaatggcctcggggcccagcgcagtgagacagtgacactttatatcacagggctgaccgcgaacagaagtggcccttttgccacaggagtcgccgggggcctgctcagcatagcaggccttgctgcgggggcactgctgctctactgctggctctcgagaaaagcagggagaaagcctgcctctgaccccgccaggagcccttcagactcggactcccaagagcccacctatcacaatgtaccagcctgggaagagctgcaaccagtgtacactaatgcaaatcctagaggagaaaatgtggtttactcagaagtacggatcatccaagagaaaaagaaacatgcagtggcctctgaccccaggcatctcaggaacaagggttcccctatcatctactctgaagttaaggtggcgtcaaccccggtttccggatccctgttcttggcttcctcagctcctcacagatgagtccacacgtctctccaactgctgtttcagcctctgcaccccaaagttccccttgggggagaagcagcattgaagtgggaagatttaggctgccccagaccatatctactggcctttgtttcacatgtcctcattctcagtctgaccagaatgcagggccctgctggactgtcacctgtttcccagttaaagccctgactggcaggttttttaatccagtggcaaggtgctcccactccagggcccagcacatctcctggattccttagtgggcttcagctgtggttgctgttctgagtactgctctcatcacacccccacagagggggtcttaccacacaaagggagagtgggccttcaggagatgccgggctggcctaacagctcaggtgctcctaaactccgacacagagttcctgctttgggtggatgcatttctcaattgtcatcagcctggtggggctactgcagtgtgctgccaaatgggacagcacacagcctgtgcacatgggacatgtgatgggtctccccacgggggctgcatttcacactcctccacctgtctcaaactctaaggtcggcacttgacaccaaggtaacttctctcctgctcatgtgtcagtgtctacctgcccaagtaagtggctttcatacaccaagtcccaagttcttcccatcctaacagaagtaacccagcaagtcaaggccaggaggaccaggggtgcagacagaacacatactggaacacaggaggtgctcaattactatttgactgactgactgaatgaatgaatgaatgaggaagaaaactgtgggtaatcaaactggcataaaatccagtgcactccctaggaaatccgggaggtattctggcttccctaagaaacaatggaagagaaggagcttggatgaggaaactgttcagcaagaggaagggcttctcacactttcatgtgcttgtggatcacctgaggatcctgtgaaaatacagatactgattcagtgggtctgcgtagagcctgagactgccattctaacatgttcccaggggatgctgatgctgctggccctgggactgcactgcatgcatgtgaagccctataggtctcagcagaggcccatggagagggaatgtgtggctctggctgcccagggcccaactcggttcacacggatcgtgctgctccctggccagcctttggccacagcaccaccagctgctgttgctgagagagcttcttctctgtgacatgttggctttcatcagccaccctgggaagcggaaagtagctgccactatctttgtttccccacctcaggcctcacactttcccatgaaaagggtgaatgtatataacctgagccctctccattcagagttgttctcccatctctgagcaatgggatgttctgttccgcttttatgatatccatcacatcttatcttgatctttgctcccagtggattgtacagtgatgacttttaagccccacggccctgaaataaaatccttccaagggcattggaagctcactccacctgaaccatggcttttcatgcttccaagtgtcagggccttgcccagatagacagggctggctctgctgccccaacctttcaaggaggaaaccagacacctgagacaggagcctgtatgcagcccagtgcagccttgcagaggacaaggctggaggcatttgtcatcactacagatatgcaactaaaatagacgtggagcaagagaaatgcattcccaccgaggccgcttttttaggcctagttgaaagtcaagaaggacagcagcaagcataggctcaggattaaagaaaaaaatctgctcacagtctgttctggaggtcacatcaccaacaaagctcacgccctatgcagttctgagaaggtggaggcaccaggctcaaaagaggaaatttagaatttctcattgggagagtaaggtacccccatcccagaatgataactgcacagtggcagaacaaactccaccctaatgtgggtggaccccgtccagtctgttgaaggcctgaatgtaacaaaagggcttattcttcctcaagtaagggggaactcctgctttgggctgggacataagtttttctgctttcagacgcaaactgaaaaatggctcttcttgggtcttgagcttgctggcatatggactgaaagaaactatgctattggatctcctggatctccagcttgctgactgcagatcttgagatatgtcagcctctacagtcacaagagctaattcattctaataaaccaatctttctgta

SEQ ID NO: 639 - DNA, 2449 bp, Homo sapiens
ctcgactctgaggtgcattctttttttgatgagaggcatctctaggtaccatccctgacctggtcctcatgctgccgaggctgttgctgttgatctgtgctccactctgtgaacctgccgagctgtttttgatagccagcccctcccatcccacagaggggagcccagtgaccctgacgtgtaagatgccctttctacagagttcagatgcccagttccagttctgctttttcagagacacccgggccttgggcccaggctggagcagctcccccaagctccagatcgctgccatgtggaaagaagacacagggtcatactggtgcgaggcacagacaatggcgtccaaagtcttgaggagcaggagatcccagataaatgtgcacagggtccctgtcgctgatgtgagcttggagactcagcccccaggaggacaggtgatggagggagacaggctggtcctcatctgctcagttgctatgggcacaggagacatcaccttcctttggtacaaaggggctgtaggtttaaaccttcagtcaaagacccagcgttcactgacagcagagtatgagattccttcagtgagggagagtgatgctgagcaatattactgtgtagctgaaaatggctatggtcccagccccagtgggctggtgagcatcactgtcagaatcccggtgtctcgcccaatcctcatgctcagggctcccagggcccaggctgcagtggaggatgtgctggagcttcactgtgaggccctgagaggctctcctccgatcctgtactggttttatcacgaggatatcaccctggggagcaggtcggccccctctggaggaggagcctccttcaacctttccctgactgaagaacattctggaaactactcctgtgaggccaacaatggcctgggggcccagcgcagtgaggcggtgacactcaacttcacagtgcctactggggccagaagcaatcatcttacctcaggagtcattgaggggctgctcagcacccttggtccagccaccgtggccttattattttgctacggcctcaaaagaaaaataggaagacgttcagccagggatccactcaggagccttcccagccctctaccccaagagttcacctacctcaactcacctaccccagggcagctacagcctatatatgaaaatgtgaatgttgtaagtggggatgaggtttattcactggcgtactataaccagccggagcaggaatcagtagcagcagaaaccctggggacacatatggaggacaaggtttccttagacatctattccaggctgaggaaagcaaacattacagatgtggactatgaagatgctatgtaaggttatggaagattctgctctttgaaaaccatccatgaccccaagcctcaggcctgatatgttcttcagagatcctggggcattagctttccagtatacctcttctggatgccattctccatggcactattccttcatctactgtgaagtgaagttggcgcagccctgaagaaactacctaggagaactaatagacacaggagtgacagggactttgttatcagaaccagattcctgccggctcctttgaaaacaggtcatattgtgctcttctgtttacaagaggaaacaagatggaataaaagaaattgggatcttgggttggagggacagtgaagcttagagcacatgaactcaaggttagtgactctgcaggacttcacagagagagctgtgcccatcattcagtccaagtgctttctctgcccagacagcacagaactccagccccgctacttacatggatcatcgagtttccacctaaaatatgattctatttattttgagtcactgttaccaaattagaactaaaacaaagttacataaaaagttattgtgactccacttaattttagtgacgtatttttgtatatataggccaacctataccacatccaaaattatgtatctattacagcccctagaagctttataaatacagtgtgtcttcttttattcacaaaatttttgaaatcgtggtaatatggtttgaaacctgtatcttaattattttttttttaaattgagacagggtctcactctgtcactcaatctggaatgcagtggcacaatcttgcctcactgcaacgcctgcctctcaggctcaagcaaacctctcacctcagcctgctgagtagctgggactacaggcacatgccaccaaacttggccattttttgtcttacgtagagacaagatttcaccgttttgcccaggctggtctcaaactcctgggctcaagcaatgtattgaattttaaaataaccaggcactcactcttatgaattaataaacatttggaggtatataaagtaaaaagttaaagtctttcctgtaagttaacacaaatgttaactattgttaaaaacttt

SEQ ID NO: 640 - DNA, 2862 bp, Homo sapiens
aattcactaatgcattctgctctttttgagagcacagcttctcagatgtgctccttggagctggtgtgcagtgtcctgactgtaagatcaagtccaaacctgttttggaattgaggaaacttctcttttgatctcagcccttggtggtccaggtcttcatgctgctgtgggtgatattactggtcctggctcctgtcagtggacagtttgcaaggacacccaggcccattattttcctccagcctccatggaccacagtcttccaaggagagagagtgaccctcacttgcaagggatttcgcttctactcaccacagaaaacaaaatggtaccatcggtaccttgggaaagaaatactaagagaaaccccagacaatatccttgaggttcaggaatctggagagtacagatgccaggcccagggctcccctctcagtagccctgtgcacttggatttttcttcagcttcgctgatcctgcaagctccactttctgtgtttgaaggagactctgtggttctgaggtgccgggcaaaggcggaagtaacactgaataatactatttacaagaatgataatgtcctggcattccttaataaaagaactgacttccatattcctcatgcatgtctcaaggacaatggtgcatatcgctgtactggatataaggaaagttgttgccctgtttcttccaatacagtcaaaatccaagtccaagagccatttacacgtccagtgctgagagccagctccttccagcccatcagcgggaacccagtgaccctgacctgtgagacccagctctctctagagaggtcagatgtcccgctccggttccgcttcttcagagatgaccagaccctgggattaggctggagtctctccccgaatttccagattactgccatgtggagtaaagattcagggttctactggtgtaaggcagcaacaatgcctcacagcgtcatatctgacagcccgagatcctggatacaggtgcagatccctgcatctcatcctgtcctcactctcagccctgaaaaggctctgaattttgagggaaccaaggtgacacttcactgtgaaacccaggaagattctctgcgcactttgtacaggttttatcatgagggtgtccccctgaggcacaagtcagtccgctgtgaaaggggagcatccatcagcttctcactgactacagagaattcagggaactactactgcacagctgacaatggccttggcgccaagcccagtaaggctgtgagcctctcagtcactgttcccgtgtctcatcctgtcctcaacctcagctctcctgaggacctgatttttgagggagccaaggtgacacttcactgtgaagcccagagaggttcactccccatcctgtaccagtttcatcatgaggatgctgccctggagcgtaggtcggccaactctgcaggaggagtggccatcagcttctctctgactgcagagcattcagggaactactactgcacagctgacaatggctttggcccccagcgcagtaaggcggtgagcctctccgtcactgtccctgtgtctcatcctgtcctcaccctcagctctgctgaggccctgacttttgaaggagccactgtgacacttcactgtgaagtccagagaggttccccacaaatcctataccagttttatcatgaggacatgcccctgtggagcagctcaacaccctctgtgggaagagtgtccttcagcttctctctgactgaaggacattcagggaattactactgcacagctgacaatggctttggtccccagcgcagtgaagtggtgagcctttttgtcactgttccagtgtctcgccccatcctcaccctcagggttcccagggcccaggctgtggtgggggacctgctggagcttcactgtgaggccccgagaggctctcccccaatcctgtactggttttatcatgaggatgtcaccctggggagcagctcagccccctctggaggagaagcttctttcaacctctctctgactgcagaacattctggaaactactcatgtgaggccaacaatggcctagtggcccagcacagtgacacaatatcactcagtgttatagttccagtatctcgtcccatcctcaccttcagggctcccagggcccaggctgtggtgggggacctgctggagcttcactgtgaggccctgagaggctcctccccaatcctgtactggttttatcatgaagatgtcaccctgggtaagatctcagccccctctggaggaggggcctccttcaacctctctctgactacagaacattctggaatctactcctgtgaggcagacaatggtctggaggcccagcgcagtgagatggtgacactgaaagttgcaggtgagtgggccctgcccaccagcagcacatctgagaactgactgtgcctgttctccctgcagctgaaaatggagccacagagctcctcagggctgtttgcttgtgtggcatcccagcacacttcctgcctgcagaacctccctgtgaaagtctcggatcctttgtggtatggttccaggaatctgatgtttcccagcagtcttcttgaagatgatcaaagcacctcactaaaaatgcaaataagacttttttagaacataaactatattctgaactgaaattattacatgaaaatgaaaccaaagaattctgagcatatgtttctctgccgtagaaaggattaagctgtttcttgtccggattcttctctcattgacttctaagaagcctctactcttgagtctctttcattactggggatgtaaatgttccttacatttccacattaaaaatcctatgttaaca

SEQ ID NO: 641 - DNA, 1934 bp, Homo sapiens
aattcactaatgcattctgctctttttgagagcacagcttctcagatgtgctccttggagctggtgtgcagtgtcctgactgtaagatcaagtccaaacctgttttggaattgaggaaacttctcttttgatctcagcccttggtggtccaggtcttcatgctgctgtgggtgatattactggtcctggctcctgtcagtggacagtttgcaaggacacccaggcccattattttcctccagcctccatggaccacagtcttccaaggagagagagtgaccctcacttgcaagggatttcgcttctactcaccacagaaaacaaaatggtaccatcggtaccttgggaaagaaatactaagagaaaccccagacaatatccttgaggttcaggaatctggagagtacagatgccaggcccagggctcccctctcagtagccctgtgcacttggatttttcttcagcttcgctgatcctgcaagctccactttctgtgtttgaaggagactctgtggttctgaggtgccgggcaaaggcggaagtaacactgaataatactatttacaagaatgataatgtcctggcattccttaataaaagaactgacttccatattcctcatgcatgtctcaaggacaatggtgcatatcgctgtactggatataaggaaagttgttgccctgtttcttccaatacagtcaaaatccaagtccaagagccatttacacgtccagtgctgagagccagctccttccagcccatcagcgggaacccagtgaccctgacctgtgagacccagctctctctagagaggtcagatgtcccgctccggttccgcttcttcagagatgaccagaccctgggattaggctggagtctctccccgaatttccagattactgccatgtggagtaaagattcagggttctactggtgtaaggcagcaacaatgcctcacagcgtcatatctgacagcccgagatcctggatacaggtgcagatccctgcatctcatcctgtcctcactctcagccctgaaaaggctctgaattttgagggaaccaaggtgacacttcactgtgaaacccaggaagattctctgcgcactttgtacaggttttatcatgagggtgtccccctgaggcacaagtcagtccgctgtgaaaggggagcatccatcagcttctcactgactacagagaattcagggaactactactgcacagctgacaatggccttggcgccaagcccagtaaggctgtgagcctctcagtcactgttcccgtgtctcatcctgtcctcaacctcagctctcctgaggacctgatttttgagggagccaaggtgacacttcactgtgaagcccagagaggttcactccccatcctgtaccagtttcatcatgaggatgctgccctggagcgtaggtcggccaactctgcaggaggagtggccatcagcttctctctgactgcagagcattcagggaactactactgcacagctgacaatggctttggcccccagcgcagtaaggcggtgagcctctccgtcactgtccctgtgtctcatcctgtcctcaccctcagctctgctgaggccctgacttttgaaggagccactgtgacacttcactgtgaagtccagagaggttccccacaaatcctataccagttttatcatgaggacatgcccctgtggagcagctcaacaccctctgtgggaagagtgtccttcagcttctctctgactgaaggacattcagggaattactactgcacagctgacaatggctttggtccccagcgcagtgaagtggtgagcctttttgtcactggtaagtgctgggttcttgccagtcacccacccctggctgagttctctctcacccattcctttaaaaatctgtttgcactgtccagtttcctcccc

SEQ ID NO: 642 - DNA, 4423 bp, Homo sapiens
cccccgcgttgggagagctgcccccgccccccgcgcgcccctccctcccgggcccggcgccgcccggcccagttccagcgcagctcagcccctgcccggcccggcccgcccggctccgcgccgcagtctccctccctcccgctccgtccccgctcgggctcccaccatccccgcccgcgaggagagcactcggcccggcggcgcgagcagagccactccagggagggggggagaccgcgagcggccggctcagcccccgccacccggggcgggaccccgaggccccggagggaccccaactccagccacgtcttgctgcgcgcccgcccggcgcggccactgccagcacgctccgggcccgccgcccgcgcgcgcggcacagacgcggggccacacttggcgccgccgcccggtgccccgcacgctcgcatgggcccgcgctgagggccccgacgaggagtcccgcgcggagtatcggcgtccacccgcccagggagagtcagacctgggggggcgagggccccccaaactcagttcggatcctacccgagtgaggcggcgccatggagctccgggtgctgctctgctgggcttcgttggccgcagctttggaagagaccctgctgaacacaaaattggaaactgctgatctgaagtgggtgacattccctcaggtggacgggcagtgggaggaactgagcggcctggatgaggaacagcacagcgtgcgcacctacgaagtgtgtgacgtgcagcgtgccccgggccaggcccactggcttcgcacaggttgggtcccacggcggggcgccgtccacgtgtacgccacgctgcgcttcaccatgctcgagtgcctgtccctgcctcgggctgggcgctcctgcaaggagaccttcaccgtcttctactatgagagcgatgcggacacggccacggccctcacgccagcctggatggagaacccctacatcaaggtggacacggtggccgcggagcatctcacccggaagcgccctggggccgaggccaccgggaaggtgaatgtcaagacgctgcgtctgggaccgctcagcaaggctggcttctacctggccttccaggaccagggtgcctgcatggccctgctatccctgcacctcttctacaaaaagtgcgcccagctgactgtgaacctgactcgattcccggagactgtgcctcgggagctggttgtgcccgtggccggtagctgcgtggtggatgccgtccccgcccctggccccagccccagcctctactgccgtgaggatggccagtgggccgaacagccggtcacgggctgcagctgtgctccggggttcgaggcagctgaggggaacaccaagtgccgagcctgtgcccagggcaccttcaagcccctgtcaggagaagggtcctgccagccatgcccagccaatagccactctaacaccattggatcagccgtctgccagtgccgcgtcgggtacttccgggcacgcacagacccccggggtgcaccctgcaccacccctccttcggctccgcggagcgtggtttcccgcctgaacggctcctccctgcacctggaatggagtgcccccctggagtctggtggccgagaggacctcacctacgccctccgctgccgggagtgccgacccggaggctcctgtgcgccctgcgggggagacctgacttttgaccccggcccccgggacctggtggagccctgggtggtggttcgagggctacgtcctgacttcacctatacctttgaggtcactgcattgaacggggtatcctccttagccacggggcccgtcccatttgagcctgtcaatgtcaccactgaccgagaggtacctcctgcagtgtccgacatccgggtgacgcggtcctcacccagcagcttgagcctggcctgggctgttccccgggcacccagtggggctgtgctggactacgaggtcaaataccatgagaagggcgccgagggtcccagcagcgtgcggttcctgaagacgtcagaaaaccgggcagagctgcgggggctgaagcggggagccagctacctggtgcaggtacgggcgcgctctgaggccggctacgggcccttcggccaggaacatcacagccagacccaactggatgagagcgagggctggcgggagcagctggccctgattgcgggcacggcagtcgtgggtgtggtcctggtcctggtggtcattgtggtcgcagttctctgcctcaggaagcagagcaatgggagagaagcagaatattcggacaaacacggacagtatctcatcgggcatggtactaaggtctacatcgaccccttcacttatgaagaccctaatgaggctgtgagggaatttgcaaaagagatcgatgtctcctacgtcaagattgaagaggtgattggtgcaggtgagtttggcgaggtgtgccgggggcggctcaaggccccagggaagaaggagagctgtgtggcaatcaagaccctgaagggtggctacacggagcggcagcggcgtgagtttctgagcgaggcctccatcatgggccagttcgagcaccccaatatcatccgcctggagggcgtggtcaccaacagcatgcccgtcatgattctcacagagttcatggagaacggcgccctggactccttcctgcggctaaacgacggacagttcacagtcatccagctcgtgggcatgctgcggggcatcgcctcgggcatgcggtaccttgccgagatgagctacgtccaccgagacctggctgctcgcaacatcctagtcaacagcaacctcgtctgcaaagtgtctgactttggcctttcccgattcctggaggagaactcttccgatcccacctacacgagctccctgggaggaaagattcccatccgatggactgccccggaggccattgccttccggaagttcacttccgccagtgatgcctggagttacgggattgtgatgtgggaggtgatgtcatttggggagaggccgtactgggacatgagcaatcaggacgtgatcaatgccattgaacaggactaccggctgcccccgcccccagactgtcccacctccctccaccagctcatgctggactgttggcagaaagaccggaatgcccggccccgcttcccccaggtggtcagcgccctggacaagatgatccggaaccccgccagcctcaaaatcgtggcccgggagaatggcggggcctcacaccctctcctggaccagcggcagcctcactactcagcttttggctctgtgggcgagtggcttcgggccatcaaaatgggaagatacgaagaaagtttcgcagccgctggctttggctccttcgagctggtcagccagatctctgctgaggacctgctccgaatcggagtcactctggcgggacaccagaagaaaatcttggccagtgtccagcacatgaagtcccaggccaagccgggaaccccgggtgggacaggaggaccggccccgcagtactgacctgcaggaactccccaccccagggacaccgcctccccattttccggggcagagtggggactcacagaggcccccagccctgtgccccgctggattgcactttgagcccgtggggtgaggagttggcaatttggagagacaggatttgggggttctgccataataggaggggaaaatcaccccccagccacctcggggaactccagaccaagggtgagggcgcctttccctcaggactgggtgtgaccagaggaaaaggaagtgcccaacatctcccagcctccccaggtgcccccctcaccttgatgggtgcgttcccgcagaccaaagagagtgtgactcccttgccagctccagagtgggggggctgtcccagggggcaagaaggggtgtcagggcccagtgacaaaatcattggggtttgtagtcccaacttgctgctgtcaccaccaaactcaatcatttttttcccttgtaaatgcccctcccccagctgctgccttcatattgaaggtttttgagttttgtttttggtcttaatttttctccccgttccctttttgtttcttcgttttgtttttctaccgtccttgtcataactttgtgttggagggaacctgtttcactatggcctcctttgcccaagttgaaacaggggcccatcatcatgtctgtttccagaacagtgccttggtcatcccacatccccggaccccgcctgggacccccaagctgtgtcctatgaaggggtgtggggtgaggtagtgaaaagggcggtagttggtggtggaacccagaaacggacgccggtgcttggaggggttcttaaattatatttaaaaaagtaactttttgtataaataaaagaaaatgggacgtgtcccagctccaggggt

SEQ ID NO: 643 - DNA, 5066 bp, Homo sapiens
gaagaacctccctctcctcaccaaccccaaactgcagtcattcaaaaactgctcccgccaactccctccaccccgagctcgcccgcttccctcccgccaaggccagccctccgcggcccccaccatcctaggcctgagaacgcggctccaacacctccactcgccccgagtttctccgcgcccgcccccgtggaccccggttcctctcccgccccagcggggccccccaggctcctcccctcccccaccttgcatccccaccctccggcccacccggccctcctcctgtgccgcgcccctgctgggcccgaaccagggcgttggcgctgcgtgccagggcctctgcctctgcgtctccccgcccactgttcacaaagtccccttcctcctccgcctcgggttccccagccccggccccctcgccccacaccacctcctgcacctcagcccggatcctcagttggctcagcagtgcccgcagccgcccctcggccgccccaggcgcctcccgaggccccaggcacaggaagatccggagccgggcgctatgccaagcgggcaccatgcccaagatggttgccatctgcagcaggaagaggccgcagacatccacatagccgggcccaccccggggccgcagcagcccccgcgttgggagagctgcccccgccccccgcgcgcccctccctcccgggcccggcgccgcccggcccagttccagcgcagctcagcccctgcccggcccggcccgcccggctccgcgccgcagtctccctccctcccgctccgtccccgctcgggctcccaccatccccgcccgcgaggagagcactcggcccggcggcgcgagcagagccactccagggagggggggagaccgcgagcggccggctcagcccccgccacccggggcgggaccccgaggccccggagggaccccaactccagccacgtcttgctgcgcgcccgcccggcgcggccactgccagcacgctccgggcccgccgcccgcgcgcgcggcacagacgcggggccacacttggcgccgccgcccggtgccccgcacgctcgcatgggcccgcgctgagggccccgacgaggagtcccgcgcggagtatcggcgtccacccgcccagggagagtcagacctgggggggcgagggccccccaaactcagttcggatcctacccgagtgaggcggcgccatggagctccgggtgctgctctgctgggcttcgttggccgcagctttggaagagaccctgctgaacacaaaattggaaactgctgatctgaagtgggtgacattccctcaggtggacgggcagtgggaggaactgagcggcctggatgaggaacagcacagcgtgcgcacctacgaagtgtgtgacgtgcagcgtgccccgggccaggcccactggcttcgcacaggttgggtcccacggcggggcgccgtccacgtgtacgccacgctgcgcttcaccatgctcgagtgcctgtccctgcctcgggctgggcgctcctgcaaggagaccttcaccgtcttctactatgagagcgatgcggacacggccacggccctcacgccagcctggatggagaacccctacatcaaggtggacacggtggccgcggagcatctcacccggaagcgccctggggccgaggccaccgggaaggtgaatgtcaagacgctgcgtctgggaccgctcagcaaggctggcttctacctggccttccaggaccagggtgcctgcatggccctgctatccctgcacctcttctacaaaaagtgcgcccagctgactgtgaacctgactcgattcccggagactgtgcctcgggagctggttgtgcccgtggccggtagctgcgtggtggatgccgtccccgcccctggccccagccccagcctctactgccgtgaggatggccagtgggccgaacagccggtcacgggctgcagctgtgctccggggttcgaggcagctgaggggaacaccaagtgccgagcctgtgcccagggcaccttcaagcccctgtcaggagaagggtcctgccagccatgcccagccaatagccactctaacaccattggatcagccgtctgccagtgccgcgtcgggtacttccgggcacgcacagacccccggggtgcaccctgcaccacccctccttcggctccgcggagcgtggtttcccgcctgaacggctcctccctgcacctggaatggagtgcccccctggagtctggtggccgagaggacctcacctacgccctccgctgccgggagtgccgacccggaggctcctgtgcgccctgcgggggagacctgacttttgaccccggcccccgggacctggtggagccctgggtggtggttcgagggctacgtcctgacttcacctatacctttgaggtcactgcattgaacggggtatcctccttagccacggggcccgtcccatttgagcctgtcaatgtcaccactgaccgagaggtacctcctgcagtgtccgacatccgggtgacgcggtcctcacccagcagcttgagcctggcctgggctgttccccgggcacccagtggggctgtgctggactacgaggtcaaataccatgagaagggcgccgagggtcccagcagcgtgcggttcctgaagacgtcagaaaaccgggcagagctgcgggggctgaagcggggagccagctacctggtgcaggtacgggcgcgctctgaggccggctacgggcccttcggccaggaacatcacagccagacccaactggatgagagcgagggctggcgggagcagctggccctgattgcgggcacggcagtcgtgggtgtggtcctggtcctggtggtcattgtggtcgcagttctctgcctcaggaagcagagcaatgggagagaagcagaatattcggacaaacacggacagtatctcatcgggcatggtactaaggtctacatcgaccccttcacttatgaagaccctaatgaggctgtgagggaatttgcaaaagagatcgatgtctcctacgtcaagattgaagaggtgattggtgcaggtgagtttggcgaggtgtgccgggggcggctcaaggccccagggaagaaggagagctgtgtggcaatcaagaccctgaagggtggctacacggagcggcagcggcgtgagtttctgagcgaggcctccatcatgggccagttcgagcaccccaatatcatccgcctggagggcgtggtcaccaacagcatgcccgtcatgattctcacagagttcatggagaacggcgccctggactccttcctgcggctaaacgacggacagttcacagtcatccagctcgtgggcatgctgcggggcatcgcctcgggcatgcggtaccttgccgagatgagctacgtccaccgagacctggctgctcgcaacatcctagtcaacagcaacctcgtctgcaaagtgtctgactttggcctttcccgattcctggaggagaactcttccgatcccacctacacgagctccctgggaggaaagattcccatccgatggactgccccggaggccattgccttccggaagttcacttccgccagtgatgcctggagttacgggattgtgatgtgggaggtgatgtcatttggggagaggccgtactgggacatgagcaatcaggacgtgatcaatgccattgaacaggactaccggctgcccccgcccccagactgtcccacctccctccaccagctcatgctggactgttggcagaaagaccggaatgcccggccccgcttcccccaggtggtcagcgccctggacaagatgatccggaaccccgccagcctcaaaatcgtggcccgggagaatggcggggcctcacaccctctcctggaccagcggcagcctcactactcagcttttggctctgtgggcgagtggcttcgggccatcaaaatgggaagatacgaagaaagtttcgcagccgctggctttggctccttcgagctggtcagccagatctctgctgaggacctgctccgaatcggagtcactctggcgggacaccagaagaaaatcttggccagtgtccagcacatgaagtcccaggccaagccgggaaccccgggtgggacaggaggaccggccccgcagtactgacctgcaggaactccccaccccagggacaccgcctccccattttccggggcagagtggggactcacagaggcccccagccctgtgccccgctggattgcactttgagcccgtggggtgaggagttggcaatttggagagacaggatttgggggttctgccataataggaggggaaaatcaccccccagccacctcggggaactccagaccaagggtgagggcgcctttccctcaggactgggtgtgaccagaggaaaaggaagtgcccaacatctcccagcctccccaggtgcccccctcaccttgatgggtgcgttcccgcagaccaaagagagtgtgactcccttgccagctccagagtgggggggctgtcccagggggcaagaaggggtgtcagggcccagtgacaaaatcattggggtttgtagtcccaacttgctgctgtcaccaccaaactcaatcatttttttcccttgtaaatgcccctcccccagctgctgccttcatattgaaggtttttgagttttgtttttggtcttaatttttctccccgttccctttttgtttcttcgttttgtttttctaccgtccttgtcataactttgtgttggagggaacctgtttcactatggcctcctttgcccaagttgaaacaggggcccatcatcatgtctgtttccagaacagtgccttggtcatcccacatccccggaccccgcctgggacccccaagctgtgtcctatgaaggggtgtggggtgaggtagtgaaaagggcggtagttggtggtggaacccagaaacggacgccggtgcttggaggggttcttaaattatatttaaaaaagtaactttttgtataaataaaagaaaatgggacgtgtcccagctccaggggt

SEQ ID NO: 644 - DNA, 4078 bp, Homo sapiens
ctgcccggcccggcccgcccggctccgcgccgcagtctccctccctcccgctccgtccccgctcgggctcccaccatccccgcccgcgaggagagcactcggcccggcggcgcgagcagagccactccagggagggggggagaccgcgagcggccggctcagcccccgccacccggggcgggaccccgaggccccggagggaccccaactccagccacgtcttgctgcgcgcccgcccggcgcggccactgccagcacgctccgggcccgccgcccgcgcgcgcggcacagacgcggggccacacttggcgccgccgcccggtgccccgcacgctcgcatgggcccgcgctgagggccccgacgaggagtcccgcgcggagtatcggcgtccacccgcccagggagagtcagacctgggggggcgagggccccccaaactcagttcggatcctacccgagtgaggcggcgccatggagctccgggtgctgctctgctgggcttcgttggccgcagctttggaagagaccctgctgaacacaaaattggaaactgctgatctgaagtgggtgacattccctcaggtggacgggcagtgggaggaactgagcggcctggatgaggaacagcacagcgtgcgcacctacgaagtgtgtgacgtgcagcgtgccccgggccaggcccactggcttcgcacaggttgggtcccacggcggggcgccgtccacgtgtacgccacgctgcgcttcaccatgctcgagtgcctgtccctgcctcgggctgggcgctcctgcaaggagaccttcaccgtcttctactatgagagcgatgcggacacggccacggccctcacgccagcctggatggagaacccctacatcaaggtggacacggtggccgcggagcatctcacccggaagcgccctggggccgaggccaccgggaaggtgaatgtcaagacgctgcgtctgggaccgctcagcaaggctggcttctacctggccttccaggaccagggtgcctgcatggccctgctatccctgcacctcttctacaaaaagtgcgcccagctgactgtgaacctgactcgattcccggagactgtgcctcgggagctggttgtgcccgtggccggtagctgcgtggtggatgccgtccccgcccctggccccagccccagcctctactgccgtgaggatggccagtgggccgaacagccggtcacgggctgcagctgtgctccggggttcgaggcagctgaggggaacaccaagtgccgagcctgtgcccagggcaccttcaagcccctgtcaggagaagggtcctgccagccatgcccagccaatagccactctaacaccattggatcagccgtctgccagtgccgcgtcgggtacttccgggcacgcacagacccccggggtgcaccctgcaccacccctccttcggctccgcggagcgtggtttcccgcctgaacggctcctccctgcacctggaatggagtgcccccctggagtctggtggccgagaggacctcacctacgccctccgctgccgggagtgccgacccggaggctcctgtgcgccctgcgggggagacctgacttttgaccccggcccccgggacctggtggagccctgggtggtggttcgagggctacgtcctgacttcacctatacctttgaggtcactgcattgaacggggtatcctccttagccacggggcccgtcccatttgagcctgtcaatgtcaccactgaccgagaggtacctcctgcagtgtccgacatccgggtgacgcggtcctcacccagcagcttgagcctggcctgggctgttccccgggcacccagtggggctgtgctggactacgaggtcaaataccatgagaagggcgccgagggtcccagcagcgtgcggttcctgaagacgtcagaaaaccgggcagagctgcgggggctgaagcggggagccagctacctggtgcaggtacgggcgcgctctgaggccggctacgggcccttcggccaggaacatcacagccagacccaactggatgagagcgagggctggcgggagcagctggccctgattgcgggcacggcagtcgtgggtgtggtcctggtcctggtggtcattgtggtcgcagttctctgcctcaggaagcagagcaatgggagagaagcagaatattcggacaaacacggacagtatctcatcgggcatggtactaaggtctacatcgaccccttcacttatgaagaccctaatgaggctgtgagggaatttgcaaaagagatcgatgtctcctacgtcaagattgaagaggtgattggtgcaggtgagtttggcgaggtgtgccgggggcggctcaaggccccagggaagaaggagagctgtgtggcaatcaagaccctgaagggtggctacacggagcggcagcggcgtgagtttctgagcgaggcctccatcatgggccagttcgagcaccccaatatcatccgcctggagggcgtggtcaccaacagcatgcccgtcatgattctcacagagttcatggagaacggcgccctggactccttcctgcggctaaacgacggacagttcacagtcatccagctcgtgggcatgctgcggggcatcgcctcgggcatgcggtaccttgccgagatgagctacgtccaccgagacctggctgctcgcaacatcctagtcaacagcaacctcgtctgcaaagtgtctgactttggcctttcccgattcctggaggagaactcttccgatcccacctacacgagctccctgggaggaaagattcccatccgatggactgccccggaggccattgccttccggaagttcacttccgccagtgatgcctggagttacgggattgtgatgtgggaggtgatgtcatttggggagaggccgtactgggacatgagcaatcaggacgtgatcaatgccattgaacaggactaccggctgcccccgcccccagactgtcccacctccctccaccagctcatgctggactgttggcagaaagaccggaatgcccggccccgcttcccccaggtggtcagcgccctggacaagatgatccggaaccccgccagcctcaaaatcgtggcccgggagaatggcggggcctcacaccctctcctggaccagcggcagcctcactactcagcttttggctctgtgggcgagtggcttcgggccatcaaaatgggaagatacgaagaaagtttcgcagccgctggctttggctccttcgagctggtcagccagatctctgctgaggacctgctccgaatcggagtcactctggcgggacaccagaagaaaatcttggccagtgtccagcacatgaagtcccaggccaagccgggaaccccgggtgggacaggaggaccggccccgcagtactgacctgcaggaactccccaccccagggacaccgcctccccattttccggggcagagtggggactcacagaggcccccagccctgtgccccgctggattgcactttgagcccgtggggtgaggagttggcaatttggagagacaggatttgggggttctgccataataggaggggaaaatcaccccccagccacctcggggaactccagaccaagggtgagggcgcctttccctcaggactgggtgtgaccagaggaaaaggaagtgcccaacatctcccagcctccccaggtgcccccctcaccttgatgggtgcgttcccgcagaccaaagagagtgtgactcccttgccagctccagagtgggggggctgtcccagggggcaagaaggggtgtcagggcccactcaatcatttttttcccttgtaaatgcccctcccccagctgctgccttcatattgaaggtttttgagttttgtttttggtcttaatttttctccccgttccctttttgtttcttcgttttgtttttctaccgtccttgtcataactttgtgttggagggaacctgtttcactatggcctcctttgcccaagttgaaacaggggcccatcatcatgtctgtttccagaacagtgccttgg

SEQ ID NO: 645 - DNA, 5199 bp, Homo sapiens
ccgaaaatggtgaccccattttaatgagggagagaccccacgataaacaaaatcgattagtaaataccaacccatgctagagagtgaagagctctggaggagaggcacgggtgcgcccctggagttgctctaaacagggtaggcagggtgctcttgtcacagagaagatgaacgaaggctcgtttgatcatttaaagcggatccagtcctgggtgggatgtaagggcacgaggcctccccagctccttcgctgggcaccctatgtggggacagggtgagttgggcgggccgctgcggttctccgagagcaccacgagggggagcccggacccctcctagcgccttccgagccctcccgcacagccttgcaagcaaaagtttttcttaaactaacaatgccagtgtaaggaggtgctcgcgcctgattggccgggggaattttgcaggtttgattccttgattggacaggaggtgttaggggtggggagagagctgatggtgggggatcccgctccctcccgcgtcagtctggccggctccgtcctcccgtaggctccgctgtagctagcaatgtgacaccaggacgcactcgctctcgcgcgctctcccaggctcgttctccctcgccctctctctctcacacacgcacgcacacacccacctctcccataaacacacacacacacatgcacacccacacccacgcgcgcccgcaccgccccacgcgcacacactcctgcccacgcccacgcagcgctccgggaagtccggtccgggcgagagcgcgaaaggataccgagaagccacccgcggagagcgcagcggcgccctgggacgcggcgctctcccggcgctgctgcctcggcttggtctcggcctgcgggccgtcggccggcgatggccctggattatctactactgctcctcctggcatccgcagtggctgcgatggaagaaacgttaatggacaccagaacggctactgcagagctgggctggacggccaatcctgcgtccgggtgggaagaagtcagtggctacgatgaaaacctgaacaccatccgcacctaccaggtgtgcaatgtcttcgagcccaaccagaacaattggctgctcaccaccttcatcaaccggcggggggcccatcgcatctacacagagatgcgcttcactgtgagagactgcagcagcctccctaatgtcccaggatcctgcaaggagaccttcaacttgtattactatgagactgactctgtcattgccaccaagaagtcagccttctggtctgaggccccctacctcaaagtagacaccattgctgcagatgagagcttctcccaggtggactttgggggaaggctgatgaaggtaaacacagaagtcaggagctttgggcctcttactcggaatggtttttacctcgcttttcaggattatggagcctgtatgtctcttctttctgtccgtgtcttcttcaaaaagtgtcccagcattgtgcaaaattttgcagtgtttccagagactatgacaggggcagagagcacatctctggtgattgctcggggcacatgcatccccaacgcagaggaagtggacgtgcccatcaaactctactgcaacggggatggggaatggatggtgcctattgggcgatgcacctgcaagcctggctatgagcctgagaacagcgtggcatgcaaggcttgccctgcagggacattcaaggccagccaggaagctgaaggctgctcccactgcccctccaacagccgctcccctgcagaggcgtctcccatctgcacctgtcggaccggttattaccgagcggactttgaccctccagaagtggcatgcactagcgtcccatcaggtccccgcaatgttatctccatcgtcaatgagacgtccatcattctggagtggcaccctccaagggagacaggtgggcgggatgatgtgacctacaacatcatctgcaaaaagtgccgggcagaccgccggagctgctcccgctgtgacgacaatgtggagtttgtgcccaggcagctgggcctgacggagtgccgcgtctccatcagcagcctgtgggcccacaccccctacacctttgacatccaggccatcaatggagtctccagcaagagtcccttccccccacagcacgtctctgtcaacatcaccacaaaccaagccgccccctccaccgttcccatcatgcaccaagtcagtgccactatgaggagcatcaccttgtcatggccacagccggagcagcccaatggcatcatcctggactatgagatccggtactatgagaaggaacacaatgagttcaactcctccatggccaggagtcagaccaacacagcaaggattgatgggctgcggcctggcatggtatatgtggtacaggtgcgtgcccgcactgttgctggctacggcaagttcagtggcaagatgtgcttccagactctgactgacgatgattacaagtcagagctgagggagcagctgcccctgattgctggctcggcagcggccggggtcgtgttcgttgtgtccttggtggccatctctatcgtctgtagcaggaaacgggcttatagcaaagaggctgtgtacagcgataagctccagcattacagcacaggccgaggctccccagggatgaagatctacattgaccccttcacttacgaggatcccaacgaagctgtccgggagtttgccaaggagattgatgtatcttttgtgaaaattgaagaggtcatcggagcaggggagtttggagaagtgtacaaggggcgtttgaaactgccaggcaagagggaaatctacgtggccatcaagaccctgaaggcagggtactcggagaagcagcgtcgggactttctgagtgaggcgagcatcatgggccagttcgaccatcctaacatcattcgcctggagggtgtggtcaccaagagtcggcctgtcatgatcatcacagagttcatggagaatggtgcattggattctttcctcaggcaaaatgacgggcagttcaccgtgatccagcttgtgggtatgctcaggggcatcgctgctggcatgaagtacctggctgagatgaattatgtgcatcgggacctggctgctaggaacattctggtcaacagtaacctggtgtgcaaggtgtccgactttggcctctcccgctacctccaggatgacacctcagatcccacctacaccagctccttgggagggaagatccctgtgagatggacagctccagaggccatcgcctaccgcaagttcacttcagccagcgacgtttggagctatgggatcgtcatgtgggaagtcatgtcatttggagagagaccctattgggatatgtccaaccaagatgtcatcaatgccatcgagcaggactaccggctgcccccacccatggactgtccagctgctctacaccagctcatgctggactgttggcagaaggaccggaacagccggccccggtttgcggagattgtcaacaccctagataagatgatccggaacccggcaagtctcaagactgtggcaaccatcaccgccgtgccttcccagcccctgctcgaccgctccatcccagacttcacggcctttaccaccgtggatgactggctcagcgccatcaaaatggtccagtacagggacagcttcctcactgctggcttcacctccctccagctggtcacccagatgacatcagaagacctcctgagaataggcatcaccttggcaggccatcagaagaagatcctgaacagcattcattctatgagggtccagataagtcagtcaccaacggcaatggcatgagaactcttgtttcttggggaaggagaggagggaaaaggaccagggtcaagggggaccagaggttgaccactgtggaatgtactggagagactggcttctcagctgaggaatgcatttccatcagtgaagaatcaaccggacctgttgctagcaggcaatctccatttctcagtgacagaagcatgtttgagatgccgtgggaaaccaaatatataataataaaaatataaaaaggtgatgttcaacagaagtgaagacaaaacaatatgcatcaggagaacaagagtaaacccagctcccactctcagtgggctgcagttgcccaaccacaggaagaaagggaaggaggtagagggaagaaacagaagcagtgttccattttcttcctcaccaatgacattcttttcttttctcctttcgtactcctccctgagagtcccctcccttctcccacactcgtttccctttgctcatgactcctgtagggaagtttcttcaaacaaaacccagctcctgagtctccagatgttgttctgtcagttgccaaaggactttgctgaccactgcatggggatccaaccaattcaattaatgtcttcatattgaagaagagatgtaccttcaattgaaaacctcgtttttcttttgtttgcattttctgcaaaaaggaaaaagaaaccacaaattggggaaaaaaaaagaagaaaaacctgtttccgtgtgcaaaagcacacatatgtatgtctgtgttataaaatgactgtgcttgttcgtaacagatgcaaacaagaaagaagaactgggaagtctttgtccctaggaaatccaaaggggctggaatatggtgttggtttggctttctggttggcccaatcggcctattggctcaatgggaagagaggagagggagaaaaataaaatgaaaggaaaaaaaaaagtttgcaaattcagacaggaaacaggtgagtggtttgaattggatgcagtgtgggccatcctggaatgatactgactgattaattattcctgataacatctcaagaaaaggagaaggaaagtgtttctggagaatgttctttcacatcactggaatctgcaattcaagaagtgacaagggagaattcttgctttacctatggactggcttaagccgtgtggcatccgaggaatgtttcaaatgtgtctgtgtttctctttacattccttgttgtacctcattgttcaattcacttttgtaaattccacctaacatttaattattttaaatttctccttttaccttaatctccttgctaattttatctgtctaattaaaaagagcagaagcatgtctgggtttacgtaaaa

SEQ ID NO: 646 - DNA, 3921 bp, Homo sapiens
cagaagttgcgcgcaggccggcgggcgggagcggacaccgaggccggcgtgcaggcgtgcgggtgtgcgggagccgggctcggggggatcggaccgagagcgagaagcgcggcatggagctccaggcagcccgcgcctgcttcgccctgctgtggggctgtgcgctggccgcggccgcggcggcgcagggcaaggaagtggtactgctggactttgctgcagctggaggggagctcggctggctcacacacccgtatggcaaagggtgggacctgatgcagaacatcatgaatgacatgccgatctacatgtactccgtgtgcaacgtgatgtctggcgaccaggacaactggctccgcaccaactgggtgtaccgaggagaggctgagcgtatcttcattgagctcaagtttactgtacgtgactgcaacagcttccctggtggcgccagctcctgcaaggagactttcaacctctactatgccgagtcggacctggactacggcaccaacttccagaagcgcctgttcaccaagattgacaccattgcgcccgatgagatcaccgtcagcagcgacttcgaggcacgccacgtgaagctgaacgtggaggagcgctccgtggggccgctcacccgcaaaggcttctacctggccttccaggatatcggtgcctgtgtggcgctgctctccgtccgtgtctactacaagaagtgccccgagctgctgcagggcctggcccacttccctgagaccatcgccggctctgatgcaccttccctggccactgtggccggcacctgtgtggaccatgccgtggtgccaccggggggtgaagagccccgtatgcactgtgcagtggatggcgagtggctggtgcccattgggcagtgcctgtgccaggcaggctacgagaaggtggaggatgcctgccaggcctgctcgcctggattttttaagtttgaggcatctgagagcccctgcttggagtgccctgagcacacgctgccatcccctgagggtgccacctcctgcgagtgtgaggaaggcttcttccgggcacctcaggacccagcgtcgatgccttgcacacgacccccttccgccccacactacctcacagccgtgggcatgggtgccaaggtggagctgcgctggacgccccctcaggacagcgggggccgcgaggacattgtctacagcgtcacctgcgaacagtgctggcccgagtctggggaatgcgggccgtgtgaggccagtgtgcgctactcggagcctcctcacggactgacccgcaccagtgtgacagtgagcgacctggagccccacatgaactacaccttcaccgtggaggcccgcaatggcgtctcaggcctggtaaccagccgcagcttccgtactgccagtgtcagcatcaaccagacagagccccccaaggtgaggctggagggccgcagcaccacctcgcttagcgtctcctggagcatccccccgccgcagcagagccgagtgtggaagtacgaggtcacttaccgcaagaagggagactccaacagctacaatgtgcgccgcaccgagggtttctccgtgaccctggacgacctggccccagacaccacctacctggtccaggtgcaggcactgacgcaggagggccagggggccggcagcaaggtgcacgaattccagacgctgtccccggagggatctggcaacttggcggtgattggcggcgtggctgtcggtgtggtcctgcttctggtgctggcaggagttggcttctttatccaccgcaggaggaagaaccagcgtgcccgccagtccccggaggacgtttacttctccaagtcagaacaactgaagcccctgaagacatacgtggacccccacacatatgaggaccccaaccaggctgtgttgaagttcactaccgagatccatccatcctgtgtcactcggcagaaggtgatcggagcaggagagtttggggaggtgtacaagggcatgctgaagacatcctcggggaagaaggaggtgccggtggccatcaagacgctgaaagccggctacacagagaagcagcgagtggacttcctcggcgaggccggcatcatgggccagttcagccaccacaacatcatccgcctagagggcgtcatctccaaatacaagcccatgatgatcatcactgagtacatggagaatggggccctggacaagttccttcgggagaaggatggcgagttcagcgtgctgcagctggtgggcatgctgcggggcatcgcagctggcatgaagtacctggccaacatgaactatgtgcaccgtgacctggctgcccgcaacatcctcgtcaacagcaacctggtctgcaaggtgtctgactttggcctgtcccgcgtgctggaggacgaccccgaggccacctacaccaccagtggcggcaagatccccatccgctggaccgccccggaggccatttcctaccggaagttcacctctgccagcgacgtgtggagctttggcattgtcatgtgggaggtgatgacctatggcgagcggccctactgggagttgtccaaccacgaggtgatgaaagccatcaatgatggcttccggctccccacacccatggactgcccctccgccatctaccagctcatgatgcagtgctggcagcaggagcgtgcccgccgccccaagttcgctgacatcgtcagcatcctggacaagctcattcgtgcccctgactccctcaagaccctggctgactttgacccccgcgtgtctatccggctccccagcacgagcggctcggagggggtgcccttccgcacggtgtccgagtggctggagtccatcaagatgcagcagtatacggagcacttcatggcggccggctacactgccatcgagaaggtggtgcagatgaccaacgacgacatcaagaggattggggtgcggctgcccggccaccagaagcgcatcgcctacagcctgctgggactcaaggaccaggtgaacactgtggggatccccatctgagcctcgacagggcctggagccccatcggccaagaatacttgaagaaacagagtggcctccctgctgtgccatgctgggccactggggactttatttatttctagttctttcctccccctgcaacttccgctgaggggtctcggatgacaccctggcctgaactgaggagatgaccagggatgctgggctgggccctctttccctgcgagacgcacacagctgagcacttagcaggcaccgccacgtcccagcatccctggagcaggagccccgccacagccttcggacagacatatgggatattcccaagccgaccttccctccgccttctcccacatgaggccatctcaggagatggagggcttggcccagcgccaagtaaacagggtacctcaagccccatttcctcacactaagagggcagactgtgaacttgactgggtgagacccaaagcggtccctgtccctctagtgccttctttagaccctcgggccccatcctcatccctgactggccaaacccttgctttcctgggcctttgcaagatgcttggttgtgttgaggtttttaaatatatattttgtactttgtggagagaatgtgtgtgtgtggcagggggccccgccagggctggggacagagggtgtcaaacattcgtgagctggggactcagggaccggtgctgcaggagtgtcctgcccatgccccagtcggccccatctctcatccttttggataagtttctattctgtcagtgttaaagattttgttttgttggacatttttttcgaatcttaatttattattttttttatatttattgttagaaaatgacttatttctgctctggaataaagttgcagatgattcaaaccg

SEQ ID NO: 647 - DNA, 3364 bp, Homo sapiens
cagaagttgcgcgcaggccggcgggcgggagcggacaccgaggccggcgtgcaggcgtgcgggtgtgcgggagccgggctcggggggatcggaccgagagcgagaagcgcggcatggagctccaggcagcccgcgcctgcttcgccctgctgtggggctgtgcgctggccgcggccgcggcggcgcagggcaaggaagtggtactgctggactttgctgcagctggaggggagctcggctggctcacacacccgtatggcaaagggtgggacctgatgcagaacatcatgaatgacatgccgatctacatgtactccgtgtgcaacgtgatgtctggcgaccaggacaactggctccgcaccaactgggtgtaccgaggagaggctgagcgtatcttcattgagctcaagtttactgtacgtgactgcaacagcttccctggtggcgccagctcctgcaaggagactttcaacctctactatgccgagtcggacctggactacggcaccaacttccagaagcgcctgttcaccaagattgacaccattgcgcccgatgagatcaccgtcagcagcgacttcgaggcacgccacgtgaagctgaacgtggaggagcgctccgtggggccgctcacccgcaaaggcttctacctggccttccaggatatcggtgcctgtgtggcgctgctctccgtccgtgtctactacaagaagtgccccgagctgctgcagggcctggcccacttccctgagaccatcgccggctctgatgcaccttccctggccactgtggccggcacctgtgtggaccatgccgtggtgccaccggggggtgaagagccccgtatgcactgtgcagtggatggcgagtggctggtgcccattgggcagtgcctgtgccaggcaggctacgagaaggtggaggatgcctgccaggcctgctcgcctggattttttaagtttgaggcatctgagagcccctgcttggagtgccctgagcacacgctgccatcccctgagggtgccacctcctgcgagtgtgaggaaggcttcttccgggcacctcaggacccagcgtcgatgccttgcacacgacccccttccgccccacactacctcacagccgtgggcatgggtgccaaggtggagctgcgctggacgccccctcaggacagcgggggccgcgaggacattgtctacagcgtcacctgcgaacagtgctggcccgagtctggggaatgcgggccgtgtgaggccagtgtgcgctactcggagcctcctcacggactgacccgcaccagtgtgacagtgagcgacctggagccccacatgaactacaccttcaccgtggaggcccgcaatggcgtctcaggcctggtaaccagccgcagcttccgtactgccagtgtcagcatcaaccagacagagccccccaaggtgaggctggagggccgcagcaccacctcgcttagcgtctcctggagcatccccccgccgcagcagagccgagtgtggaagtacgaggtcacttaccgcaagaagggagactccaacagctacaatgtgcgccgcaccgagggtttctccgtgaccctggacgacctggccccagacaccacctacctggtccaggtgcaggcactgacgcaggagggccagggggccggcagcaaggtgcacgaattccagacgctgtccccggagggatctggcaacttggcggtgattggcggcgtggctgtcggtgtggtcctgcttctggtgctggcaggagttggcttctttatccaccgcaggaggaagaaccagcgtgcccgccagtccccggaggacgtttacttctccaagtcagaacaactgaagcccctgaagacatacgtggacccccacacatatgaggaccccaaccaggctgtgttgaagttcactaccgagatccatccatcctgtgtcactcggcagaaggtgatcggagcaggagagtttggggaggtgtacaagggcatgctgaagacatcctcggggaagaaggaggtgccggtggccatcaagacgctgaaagccggctacacagagaagcagcgagtggacttcctcggcgaggccggcatcatgggccagttcagccaccacaacatcatccgcctagagggcgtcatctccaaatacaagcccatgatgatcatcactgagtacatggagaatggggccctggacaagttccttcgggagaaggatggcgagttcagcgtgctgcagctggtgggcatgctgcggggcatcgcagctggcatgaagtacctggccaacatgaactatgtgcaccgtgacctggctgcccgcaacatcctcgtcaacagcaacctggtctgcaaggtgtctgactttggcctgtcccgcgtgctggaggacgaccccgaggccacctacaccaccagtggcggcaagatccccatccgctggaccgccccggaggccatttcctaccggaagttcacctctgccagcgacgtgtggagctttggcattgtcatgtgggaggtgatgacctatggcgagcggccctactgggagttgtccaaccacgaggtgatgaaagccatcaatgatggcttccggctccccacacccatggactgcccctccgccatctaccagctcatgatgcagtgctggcagcaggagcgtgcccgccgccccaagttcgctgacatcgtcagcatcctggacaagctcattcgtgcccctgactccctcaagaccctggctgactttgacccccgcgtgtctatccggctccccagcacgagcggctcggagggggtgcccttccgcacggtgtccgagtggctggagtccatcaagatgcagcagtatacggagcacttcatggcggccggctacactgccatcgagaaggtggtgcagatgaccaacgacgacatcaagaggattggggtgcggctgcccggccaccagaagcgcatcgcctacagcctgctgggactcaaggaccaggtgaacactgtggggatccccatctgagcctcgacagggcctggagccccatcggccaagaatacttgaagaaacagagtggcctccctgctgtgccatgctgggccactggggaagagggtgtcaaacattcgtgagctggggactcagggaccggtgctgcaggagtgtcctgcccatgccccagtcggccccatctctcatccttttggataagtttctattctgtcagtgttaaagattttgttttgttggacatttttttcgaatcttaatttattattttttttatatttattgttagaaaatgacttatttctgctctggaataaagttgcagatgattc

SEQ ID NO: 648 - DNA, 4848 bp, Homo sapiens
ccctggccccccgagcccggggcgcgcgctcccgcccgggccgtccgggccccgcggcgccgcggcccgaggccccgggaagcgcagccatggctctgcggaggctgggggccgcgctgctgctgctgccgctgctcgccgccgtggaagaaacgctaatggactccactacagcgactgctgagctgggctggatggtgcatcctccatcagggtgggaagaggtgagtggctacgatgagaacatgaacacgatccgcacgtaccaggtgtgcaacgtgtttgagtcaagccagaacaactggctacggaccaagtttatccggcgccgtggcgcccaccgcatccacgtggagatgaagttttcggtgcgtgactgcagcagcatccccagcgtgcctggctcctgcaaggagaccttcaacctctattactatgaggctgactttgactcggccaccaagaccttccccaactggatggagaatccatgggtgaaggtggataccattgcagccgacgagagcttctcccaggtggacctgggtggccgcgtcatgaaaatcaacaccgaggtgcggagcttcggacctgtgtcccgcagcggcttctacctggccttccaggactatggcggctgcatgtccctcatcgccgtgcgtgtcttctaccgcaagtgcccccgcatcatccagaatggcgccatcttccaggaaaccctgtcgggggctgagagcacatcgctggtggctgcccggggcagctgcatcgccaatgcggaagaggtggatgtacccatcaagctctactgtaacggggacggcgagtggctggtgcccatcgggcgctgcatgtgcaaagcaggcttcgaggccgttgagaatggcaccgtctgccgaggttgtccatctgggactttcaaggccaaccaaggggatgaggcctgtacccactgtcccatcaacagccggaccacttctgaaggggccaccaactgtgtctgccgcaatggctactacagagcagacctggaccccctggacatgccctgcacaaccatcccctccgcgccccaggctgtgatttccagtgtcaatgagacctccctcatgctggagtggacccctccccgcgactccggaggccgagaggacctcgtctacaacatcatctgcaagagctgtggctcgggccggggtgcctgcacccgctgcggggacaatgtacagtacgcaccacgccagctaggcctgaccgagccacgcatttacatcagtgacctgctggcccacacccagtacaccttcgagatccaggctgtgaacggcgttactgaccagagccccttctcgcctcagttcgcctctgtgaacatcaccaccaaccaggcagctccatcggcagtgtccatcatgcatcaggtgagccgcaccgtggacagcattaccctgtcgtggtcccagccggaccagcccaatggcgtgatcctggactatgagctgcagtactatgagaaggagctcagtgagtacaacgccacagccataaaaagccccaccaacacggtcaccgtgcagggcctcaaagccggcgccatctatgtcttccaggtgcgggcacgcaccgtggcaggctacgggcgctacagcggcaagatgtacttccagaccatgacagaagccgagtaccagacaagcatccaggagaagttgccactcatcatcggctcctcggccgctggcctggtcttcctcattgctgtggttgtcatcgccatcgtgtgtaacagaagacgggggtttgagcgtgctgactcggagtacacggacaagctgcaacactacaccagtggccacagtatgtacacacccaagcgggctggaacccttgggcccttcactgtcggttccccaatctacatcgatcctttcacctacgaggaccccaacgaggcagtgcgggagtttgccaaggaaattgacatctcctgtgtcaaaattgagcaggtgatcggagcaggggagtttggcgaggtctgcagtggccacctgaagctgccaggcaagagagagatctttgtggccatcaagacgctcaagtcgggctacacggagaagcagcgccgggacttcctgagcgaagcctccatcatgggccagttcgaccatcccaacgtcatccacctggagggtgtcgtgaccaagagcacacctgtgatgatcatcaccgagttcatggagaatggctccctggactcctttctccggcaaaacgatgggcagttcacagtcatccagctggtgggcatgcttcggggcatcgcagctggcatgaagtacctggcagacatgaactatgttcaccgtgacctggctgcccgcaacatcctcgtcaacagcaacctggtctgcaaggtgtcggactttgggctctcacgctttctagaggacgatacctcagaccccacctacaccagtgccctgggcggaaagatccccatccgctggacagccccggaagccatccagtaccggaagttcacctcggccagtgatgtgtggagctacggcattgtcatgtgggaggtgatgtcctatggggagcggccctactgggacatgaccaaccaggatgtaatcaatgccattgagcaggactatcggctgccaccgcccatggactgcccgagcgccctgcaccaactcatgctggactgttggcagaaggaccgcaaccaccggcccaagttcggccaaattgtcaacacgctagacaagatgatccgcaatcccaacagcctcaaagccatggcgcccctctcctctggcatcaacctgccgctgctggaccgcacgatccccgactacaccagctttaacacggtggacgagtggctggaggccatcaagatggggcagtacaaggagagcttcgccaatgccggcttcacctcctttgacgtcgtgtctcagatgatgatggaggacattctccgggttggggtcactttggctggccaccagaaaaaaatcctgaacagtatccaggtgatgcgggcgcagatgaaccagattcagtctgtggaggtttgacattcacctgcctcggctcacctcttcctccaagccccgccccctctgccccacgtgccggccctcctggtgctctatccactgcagggccagccactcgccaggaggccacgggccacgggaagaaccaagcggtgccagccacgagacgtcaccaagaaaacatgcaactcaaacgacggaaaaaaaaagggaatgggaaaaaagaaaacagatcctgggagggggcgggaaatacaaggaatattttttaaagaggattctcataaggaaagcaatgactgttcttgcgggggataaaaaagggcttgggagattcatgcgatgtgtccaatcggagacaaaagcagtttctctccaactccctctgggaaggtgacctggccagagccaagaaacactttcagaaaaacaaatgtgaaggggagagacaggggccgcccttggctcctgtccctgctgctcctctaggcctcactcaacaaccaagcgcctggaggacgggacagatggacagacagccaccctgagaacccctctgggaaaatctattcctgccaccactgggcaaacagaagaatttttctgtctttggagagtattttagaaactccaatgaaagacactgtttctcctgttggctcacagggctgaaaggggcttttgtcctcctgggtcagggagaacgcggggaccccagaaaggtcagccttcctgaggatgggcaacccccaggtctgcagctccaggtacatatcacgcgcacagcctggcagcctggccctcctggtgcccactcccgccagcccctgcctcgaggactgatactgcagtgactgccgtcagctccgactgccgctgagaagggttgatcctgcatctgggtttgtttacagcaattcctggactcgggggtattttggtcacagggtggttttggtttagggggtttgtttgttgggttgttttttgttttttggttttttttaatgacaatgaagtgacactttgacatttcctaccttttgaggacttgatccttctccaggaagaaggtgctttctgcttactgacttaggcaatacaccaagggcgagattttatatgcacatttctggatttttttatacggttttcattgacactcttccctcctcccacctgccaccaggcctcaccaaagcccactgccatggggccatctgggccattcagagactggagtgagatttgggtgtggagggggaggcgccaaggtggaggagcttcccactccaggactgttgatgaaagggacagattgaggaggaagtgggctctgaggctgcagggctggaagtccttgcccacttcccactctcctgccccaatctatctagtacttcccaggcaaataggcccctttgaggctcctgagtgccctcagatggtcaaaacccagttttccctctgggagcctaaaccaggctgcatcggaggccaggacccggatcattcactgtgataccctgccctccagagggtgcgctcagagacacgggcaagcatgcctcttcccttccctggagagaaagtgtgtgatttctctcccacctccttccccccaccagacctttgctgggcctaaaggtcttggccatggggacgccctcagtctagggatctggccacagactccctcctgtgaaccaacacagacacccaagcagagcaatcagttagtgaattgaatggaaataaacgctttagttataat

SEQ ID NO: 649 - DNA, 6605 bp, Homo sapiens
attggagtgtggagcaagcggccggtctgcagtcggagacttgcaggcagcaaacacggtgcgagcgaacaggagtgggggggaaattaaaaaaagctaaacgtggagcagccgatcggggaccgagaaggggaatcgatgcaaggagcacaataaaacaaaagctacttcggaacaaacagcatttaaaaatccacgactcaagataactgaaacctaaaataaaacctgctcatgcaccatggtttttcaaactcggtacccttcatggattattttatgctacatctggctgctccgctttgcacacacaggggaggcgcaggctgcgaaggaagtactactgctggattctaaagcacaacaaacagagttggagtggatttcctctccacccaatgggtgggaagaaattagtggtttggatgagaactataccccgatacgaacataccaggtgtgccaagtcatggagcccaaccaaaacaactggctgcggactaactggatttccaaaggcaatgcacaaaggatttttgtagaattgaaattcaccctgagggattgtaacagtcttcctggagtactgggaacttgcaaggaaacatttaatttgtactattatgaaacagactatgacactggcaggaatataagagaaaacctctatgtaaaaatagacaccattgctgcagatgaaagttttacccaaggtgaccttggtgaaagaaagatgaagcttaacactgaggtgagagagattggacctttgtccaaaaagggattctatcttgcctttcaggatgtaggggcttgcatagctttggtttctgtcaaagtgtactacaagaagtgctggtccattattgagaacttagctatctttccagatacagtgactggttcagaattttcctctttagtcgaggttcgagggacatgtgtcagcagtgcagaggaagaagcggaaaacgcccccaggatgcactgcagtgcagaaggagaatggttagtgcccattggaaaatgtatctgcaaagcaggctaccagcaaaaaggagacacttgtgaaccctgtggccgtgggttctacaagtcttcctctcaagatcttcagtgctctcgttgtccaactcacagtttttctgataaagaaggctcctccagatgtgaatgtgaagatgggtattacagggctccatctgacccaccatacgttgcgtgcacaaggcctccatctgcaccacagaacctcattttcaacatcaaccaaaccacagtaagtttggaatggagtcctcctgcagacaatgggggaagaaacgatgtgacctacagaatattgtgtaagcggtgcagttgggagcagggcgaatgtgttccctgtgggagtaacattggatacatgccccagcagactggattagaggataactatgtcactgtcatggacctgctagcccacgctaattatacttttgaagttgaagctgtaaatggagtttctgacttaagccgatcccagaggctctttgctgctgtcagtatcaccactggtcaagcagctccctcgcaagtgagcggagtaatgaaggagagagtactgcagcggagtgtcgagctttcctggcaggaaccagagcatcccaatggagtcatcacagaatatgaaatcaagtattacgagaaagatcaaagggaacggacctactcaacagtaaaaaccaagtctacttcagcctccattaataatctgaaaccaggaacagtgtatgttttccagattcgggcttttactgctgctggttatggaaattacagtcccagacttgatgttgctacactagaggaagctacaggtaaaatgtttgaagctacagctgtctccagtgaacagaatcctgttattatcattgctgtggttgctgtagctgggaccatcattttggtgttcatggtctttggcttcatcattgggagaaggcactgtggttatagcaaagctgaccaagaaggcgatgaagagctttactttcattttaaatttccaggcaccaaaacctacattgaccctgaaacctatgaggacccaaatagagctgtccatcaattcgccaaggagctagatgcctcctgtattaaaattgagcgtgtgattggtgcaggagaattcggtgaagtctgcagtggccgtttgaaacttccagggaaaagagatgttgcagtagccataaaaaccctgaaagttggttacacagaaaaacaaaggagagactttttgtgtgaagcaagcatcatggggcagtttgaccacccaaatgttgtccatttggaaggggttgttacaagagggaaaccagtcatgatagtaatagagttcatggaaaatggagccctagatgcatttctcaggaaacatgatgggcaatttacagtcattcagttagtaggaatgctgagaggaattgctgctggaatgagatatttggctgatatgggatatgttcacagggaccttgcagctcgcaatattcttgtcaacagcaatctcgtttgtaaagtgtcagattttggcctgtcccgagttatagaggatgatccagaagctgtctatacaactactggtggaaaaattccagtaaggtggacagcacccgaagccatccagtaccggaaattcacatcagccagtgatgtatggagctatggaatagtcatgtgggaagttatgtcttatggagaaagaccttattgggacatgtcaaatcaagatgttataaaagcaatagaagaaggttatcgtttaccagcacccatggactgcccagctggccttcaccagctaatgttggattgttggcaaaaggagcgtgctgaaaggccaaaatttgaacagatagttggaattctagacaaaatgattcgaaacccaaatagtctgaaaactcccctgggaacttgtagtaggccaataagccctcttctggatcaaaacactcctgatttcactaccttttgttcagttggagaatggctacaagctattaagatggaaagatataaagataatttcacggcagctggctacaattcccttgaatcagtagccaggatgactattgaggatgtgatgagtttagggatcacactggttggtcatcaaaagaaaatcatgagcagcattcagactatgagagcacaaatgctacatttacatggaactggcattcaagtgtgatatgcatttctcccttttaagggagattacagactgcaagagaacagtactggccttcagtatatgcatagaatgctgctagaagacaagtgatgtcctgggtccttccaacagtgaagagaagatttaagaagcacctatagacttgaactcctaagtgccaccagaatatataaaaagggaatttaggatccaccatcggtggccaggaaaatagcagtgacaataaacaaagtactacctgaaaaacatccaaacaccttgagctctctaacctcctttttgtcttatagactttttaaaatgtacataaagaatttaagaaagaatatatttgtcaaataaaatcatgatcttattgttaaaattaatgaaatattttccttaaatatgtgatttcagactattcctttttaaaatcatttgtgtttattcttcataaggactttgttttagaaagctgtttatagctttggacctttttagtgttaaatctgtaacattactacactgggtacctttgaaagaatctcaaatttcaaaagaaatagcatgattgaagatacatctctgttagaacattggtatcctttttgtgccattttattctgtttaatcagtgctgttttgatattgtttgctaattggcaggtagtcaagaaaatgcaagttgccaagagctctgatattttttaaaaagaatttttttgtaaagatcagacaacacactatcttttcaatgaaaaaagcaataatgatccatacatactataaggcacttttaacagattgtttatagagtgattttactagaaagaatttaataaactcgaagtttaggtttatgagtatataaacaaatgaggcacttcatctgaagaatgttggtgaaggcaagtctctgaaagcagaactatccagtgttatctaaaaattaatctgagcacatcaagattttttcattctcgtgacattaggaaatttaggataaatagttgacatatattttatatcctcttctgttgaatgcagtccaaacatgaaaggaaataattgttttatattataactctgaagcatgataaaggggcagttcacaattttcaccatttaaacacaaatttgctgcacagaatatcaccattgcagttcaaaacaaaacaaaacaaaaagtcttttgtttgtgaacactgatgcaagaaacttgttaaatgaaaggactctttaccctagaaggaagaggtgaaggatctggcttgtttttaaagctttatttattaaaccatattatttgattactgtgttagaatttcataagcaataattaaatgtgtctttatagatattgcaggaatgtatacatattgtgattaatgctttcaaaacttatgaaaatcatgaactaccccagaattgaactgttgtacttccaaagagaattgggctgtttataatgattttaatagagaaagatcccagggatcggtcataattggtcttgtttgataatgtgggcatccacaaacaaacaaacaaataacagaaacaaaatctgtaaatgttcctttgtaaaacttgtaaattttatttatactgtcttgttttgtacacacatttctctgtagtgggctctgaatacattgaaaatgcactatatttttctattttacttgcagagcatcacaaaagaacaggtattttcagtgctacataatgtgttttcccacatttaggaccaaagacggctatagaaaaactcaaatggattgcttcccaaacccctccccaccctttttttttggttttaaatcactgtacagtgttatttgatattttaatttattttttgattgactagaaaaatcattttaatttcactaaaatgttttttgtccctaaggaaaagtaatctgtaaaaataattttaattagcataatacagtcacctagacacttccatttgtaatctttgtaatagactgtaaatatatttttggaactataacacaatgtgcttgagggttatttttcagtgtctgcagtgtgtacaagtgtttatactaagtccagcactttacaattctaatcagtagcattggcctttgtgagaatgagtgaaagagtttgagtgagtgttcttaattccttttggattctagactcactaataatgaagttcttttcttgttcatagcttaaggtgcttattttttctattaaaattaaattaacaaaagccattctagaaatagaagacatagtatggtacatgcaaacggtgtctttcctgcttttttctagcactagatttatagttgagtagtctttcttgagtagaagggcagaataaaagtttttttgagtttttttcaaaaataactttttccttcagcaatatacctcatctgccttaaattttttacagctctttacagggaaaggggagaagggatgggaaagacacacagcacaataggaagtgtatgattacatcactatctcgtttgtaagtttcttttcctaatcaacattatgatttcgaaatacatgtatgtgaaacaaatattaagagaaaaagaattaacattgtaatgctgattgtaatactctcttccagaaagagatgagatggtataacgataagaatgtacaacttgcaccttgaaatctttttttttaaataaattagtgctcaggggaggaaaagtagagaaagtgaacgtcaaaaatagaattccaaaattataaaaatgcaaaaggaaatggcctccttgctttaatagagccaccttttttagaacactgtcctcacacttgacctgtgttttgcattcagtactgaaataaaagtaacttgttctacatttgaatctaacattttctcagcaattgatctggtccttgtttactagaactggtggtttatgcttgtcagagcactattagttgaatcatattgtatacttatgtaatctacattagctagtactgtttaggactatattttaattgctcttcttatccgtgtttttaagacaattaaaatggtgtgattcacctctcttttttatttaggtaatgctgatattctcccttttgtttcttgagtagcctagaactatgctactcactgatgtgcatgttcaaataaattactgatgtgtatttttttgctatatgtggagaaatcatggggaactcggggcgagatgtgcttttcgttggttgaatttgtccctccttgcctaagaaatactacaggggtcatccttttataaggacaaactgcttttgaacagtgtcttcaatgtatcaagcacaaataactctttcttcaacatgaatcataagtctctttttaccagct

SEQ ID NO: 650 - DNA, 6335 bp, Homo sapiens
aagcggcaggagcagcgttggcaccggcgaaccatggctgggattttctatttcgccctattttcgtgtctcttcgggatttgcgacgctgtcacaggttccagggtataccccgcgaatgaagttaccttattggattccagatctgttcagggagaacttgggtggatagcaagccctctggaaggagggtgggaggaagtgagtatcatggatgaaaaaaatacaccaatccgaacctaccaagtgtgcaatgtgatggaacccagccagaataactggctacgaactgattggatcacccgagaaggggctcagagggtgtatattgagattaaattcaccttgagggactgcaatagtcttccgggcgtcatggggacttgcaaggagacgtttaacctgtactactatgaatcagacaacgacaaagagcgtttcatcagagagaaccagtttgtcaaaattgacaccattgctgctgatgagagcttcacccaagtggacattggtgacagaatcatgaagctgaacaccgagatccgggatgtagggccattaagcaaaaaggggttttacctggcttttcaggatgtgggggcctgcatcgccctggtatcagtccgtgtgttctataaaaagtgtccactcacagtccgcaatctggcccagtttcctgacaccatcacaggggctgatacgtcttccctggtggaagttcgaggctcctgtgtcaacaactcagaagagaaagatgtgccaaaaatgtactgtggggcagatggtgaatggctggtacccattggcaactgcctatgcaacgctgggcatgaggagcggagcggagaatgccaagcttgcaaaattggatattacaaggctctctccacggatgccacctgtgccaagtgcccaccccacagctactctgtctgggaaggagccacctcgtgcacctgtgaccgaggctttttcagagctgacaacgatgctgcctctatgccctgcacccgtccaccatctgctcccctgaacttgatttcaaatgtcaacgagacatctgtgaacttggaatggagtagccctcagaatacaggtggccgccaggacatttcctataatgtggtatgcaagaaatgtggagctggtgaccccagcaagtgccgaccctgtggaagtggggtccactacaccccacagcagaatggcttgaagaccaccaaagtctccatcactgacctcctagctcataccaattacacctttgaaatctgggctgtgaatggagtgtccaaatataaccctaacccagaccaatcagtttctgtcactgtgaccaccaaccaagcagcaccatcatccattgctttggtccaggctaaagaagtcacaagatacagtgtggcactggcttggctggaaccagatcggcccaatggggtaatcctggaatatgaagtcaagtattatgagaaggatcagaatgagcgaagctatcgtatagttcggacagctgccaggaacacagatatcaaaggcctgaaccctctcacttcctatgttttccacgtgcgagccaggacagcagctggctatggagacttcagtgagcccttggaggttacaaccaacacagtgccttcccggatcattggagatggggctaactccacagtccttctggtctctgtctcgggcagtgtggtgctggtggtaattctcattgcagcttttgtcatcagccggagacggagtaaatacagtaaagccaaacaagaagcggatgaagagaaacatttgaatcaaggtgtaagaacatatgtggacccctttacgtacgaagatcccaaccaagcagtgcgagagtttgccaaagaaattgacgcatcctgcattaagattgaaaaagttataggagttggtgaatttggtgaggtatgcagtgggcgtctcaaagtgcctggcaagagagagatctgtgtggctatcaagactctgaaagctggttatacagacaaacagaggagagacttcctgagtgaggccagcatcatgggacagtttgaccatccgaacatcattcacttggaaggcgtggtcactaaatgtaaaccagtaatgatcataacagagtacatggagaatggctccttggatgcattcctcaggaaaaatgatggcagatttacagtcattcagctggtgggcatgcttcgtggcattgggtctgggatgaagtatttatctgatatgagctatgtgcatcgtgatctggccgcacggaacatcctggtgaacagcaacttggtctgcaaagtgtctgattttggcatgtcccgagtgcttgaggatgatccggaagcagcttacaccaccaggggtggcaagattcctatccggtggactgcgccagaagcaattgcctatcgtaaattcacatcagcaagtgatgtatggagctatggaatcgttatgtgggaagtgatgtcgtacggggagaggccctattgggatatgtccaatcaagatgtgattaaagccattgaggaaggctatcggttaccccctccaatggactgccccattgcgctccaccagctgatgctagactgctggcagaaggagaggagcgacaggcctaaatttgggcagattgtcaacatgttggacaaactcatccgcaaccccaacagcttgaagaggacagggacggagagctccagacctaacactgccttgttggatccaagctcccctgaattctctgctgtggtatcagtgggcgattggctccaggccattaaaatggaccggtataaggataacttcacagctgctggttataccacactagaggctgtggtgcacgtgaaccaggaggacctggcaagaattggtatcacagccatcacgcaccagaataagattttgagcagtgtccaggcaatgcgaacccaaatgcagcagatgcacggcagaatggttcccgtctgagccagtactgaataaactcaaaactcttgaaattagtttacctcatccatgcactttaattgaagaactgcactttttttacttcgtcttcgccctctgaaattaaagaaatgaaaaaaaaaaacaatatctgcagcgttgcttggtgcacagattgctgaaactgtggggcttacagaaatgactgccggtcatttgaatgagacctggaacaaatcgtttctcagaagtacttttctgttcatcaccagtctgtaaaatacatgtacctatagaaatagaacactgcctctgagttttgatgctgtatttgctgccagacactgagcttctgagacatccctgattctctctccatttggaattacaaccattgtattttgtttgtggcataaattacagtcatctgtctttcactggaatgaagaccatgcctaggaacattttttaaggactcagctgtggcttttagggcttggttcataccatgggggaaaaaaaagtcctaggagaaagcgacgtggctcattagtgttgcctcttcagtgctcaagccgcctggtggattcctatgacacagggggcctggaaagaaagggaaagtggatttaaaatatatatatacgtaacccaagccccataacccctaactggacaaatgaggtctgtttctttgggcctgaggctgtgccatataaagtcttattttgggactttacaaacttgtcctaactatcttgtggatagtgggctgtgacaatctggaatagagaacgttcacacttcgctcctttaaagaagcgaccccagatctgcaagggagtagattctgctatcttggcctcacagcccttcctgttgattacaaagcccgtggaagaaaacagaacacaccctcctcagttccgtctaaatgtgtttcttctgcttcaattacaccagttctggggcaaagacactgatgaaacaacacccatacctgaaaagaataaatgtgtgactttcaaatcccctttcgcagtgaaagaaacagcaaacacttaagattcagcatctgttctccagttgcactgaggaatgcactgtctcgcagcaccagctctgcagagcccttgccccagactctttgcggttttatttatatgtatttccatatttcattcctgtgtgtcactgctgcattggtgtggcagcaagtgaccaaatgctacaggtcttactatggacaccaggtcaggtgcaaccacacaaaacaaagccagttccatgagctgcctatgatatgcattgcggaagtaacattttacccagggtgtgccattgcagtgatataaatatatttttttcttagactaaatatgagctgactatctcttttgatgtgtgtacataggtgtgagtgtgtctgtatgcgtgcctgtctgtgtgcgggtgtgtgtatgtgcgtagcctcatgcttaggactacccatgaatgttgtggaatgctacacctggagagttctggttttccaccagtttcaagatgaagaactacatgatacagtggacctggagaccatccccttggaaagacaacccagagatgttcagcatcctgtatctacacgcatcctgtatctacacgtgtattttgtagctgtcacactaaccttaataagaattctacagctttggacagaggcattttcaccttaatggtgaagtaatttaaaatataaatccattcaggtgacaacccatcatcaaaattacaaattttctgattgaactcatctgaatcatcagttccttgatggagagagagaaggagatggaatgtgtctggtaaccccaaatggagtacaagtagcctttgttttcctgcataaatggacttgttgaatgcgaacgaatatatgcaattcatatacttttggagatgaacgtagatatgtgtgtcagctttgagatggtgtgtcctggattaatactttgtctcccaatatcacagaaaaatacatgccagtgactcttgaggttaaggtagttgggatgaaatggcctcaggcaatttcacattccctaattacctggaaagttctacagtaattaatatgcagctaactcctgttgccctcacaagagcatcagccttctagaatcggagctccggagtgtgaagattcagtattgatatgatatgtataccaaactccagccaacttactgccatttttcataatctgagtggctgccttgcttatcctaagctgtggttgcagaaaccgtggccatttatataagctataacatcaaatcagggaaaaatgaggaaaaaaaatagattctgaaccatttattgttgaataagtagagaaaatcatcaataaatatttattacattctgacagggtgtgtggcattgtgttctatgccagagtgacaaagttgattcacccctttttggggaccttaatatattttttaagggatgtgcctatgcattgatgcctgaaaaatatgtataaagaaatgaggttgactcttctgagcagttcatcttttccagaggtaagggtaggaggccaacttcagggtctgggtctgagcccgtgggcaagccctggccgagtgagctccaatgctaactcatgtgccgatctctagagcagtgggaaactaccccgctgcaccaaatcaagtagcttcaccttgtgtatgcaggccccaagttattttttagcaatcttacgagtgaaatgttctggtgggttgaaaaacgttcttattttaaagaaaggttgtgctcgctacactgctggtgtgtgcattctgagacctcttgtattcaatctgtgaaggatatgtgtattaatccgtacacccgtatagcctcaatatttgtctgaagacacttaaattctgacccataaaggaaagttctagaagcaatattttcacttatttaacattctccaaacaacatcaagcattgatacacactgaagagtgcgtttattttttgtatcactctaagtatgttggaatatgcaaggactgtggttcaaattagaatgtataaggcatattataatttagttcatactgaataagaaattaacagaacattgttcggttcacacgttccaaactttgagtgatttctggagttagacatagattttctattttgttttaatttgtcaaggtatttttcttcccttcatgaactttaggtacacataacttatgtcatttatttatggtcttttatacctagtttgtaaaattgtaaaatagcaaactaaatgcaaagagtttgcatttgaaaataataaagtagttgccgtatacaaccct

SEQ ID NO: 651 - DNA, 6275 bp, Homo sapiens
aagcggcaggagcagcgttggcaccggcgaaccatggctgggattttctatttcgccctattttcgtgtctcttcgggatttgcgacgctgtcacaggttccagggtataccccgcgaatgaagttaccttattggattccagatctgttcagggagaacttgggtggatagcaagccctctggaaggagggtgggaggaagtgagtatcatggatgaaaaaaatacaccaatccgaacctaccaagtgtgcaatgtgatggaacccagccagaataactggctacgaactgattggatcacccgagaaggggctcagagggtgtatattgagattaaattcaccttgagggactgcaatagtcttccgggcgtcatggggacttgcaaggagacgtttaacctgtactactatgaatcagacaacgacaaagagcgtttcatcagagagaaccagtttgtcaaaattgacaccattgctgctgatgagagcttcacccaagtggacattggtgacagaatcatgaagctgaacaccgagatccgggatgtagggccattaagcaaaaaggggttttacctggcttttcaggatgtgggggcctgcatcgccctggtatcagtccgtgtgttctataaaaagtgtccactcacagtccgcaatctggcccagtttcctgacaccatcacaggggctgatacgtcttccctggtggaagttcgaggctcctgtgtcaacaactcagaagagaaagatgtgccaaaaatgtactgtggggcagatggtgaatggctggtacccattggcaactgcctatgcaacgctgggcatgaggagcggagcggagaatgccaagcttgcaaaattggatattacaaggctctctccacggatgccacctgtgccaagtgcccaccccacagctactctgtctgggaaggagccacctcgtgcacctgtgaccgaggctttttcagagctgacaacgatgctgcctctatgccctgcacccgtccaccatctgctcccctgaacttgatttcaaatgtcaacgagacatctgtgaacttggaatggagtagccctcagaatacaggtggccgccaggacatttcctataatgtggtatgcaagaaatgtggagctggtgaccccagcaagtgccgaccctgtggaagtggggtccactacaccccacagcagaatggcttgaagaccaccaaagtctccatcactgacctcctagctcataccaattacacctttgaaatctgggctgtgaatggagtgtccaaatataaccctaacccagaccaatcagtttctgtcactgtgaccaccaaccaagcagcaccatcatccattgctttggtccaggctaaagaagtcacaagatacagtgtggcactggcttggctggaaccagatcggcccaatggggtaatcctggaatatgaagtcaagtattatgagaaggatcagaatgagcgaagctatcgtatagttcggacagctgccaggaacacagatatcaaaggcctgaaccctctcacttcctatgttttccacgtgcgagccaggacagcagctggctatggagacttcagtgagcccttggaggttacaaccaacacagtgccttcccggatcattggagatggggctaactccacagtccttctggtctctgtctcgggcagtgtggtgctggtggtaattctcattgcagcttttgtcatcagccggagacggagtaaatacagtaaagccaaacaagaagcggatgaagagaaacatttgaatcaaggtgtaagaacatatgtggacccctttacgtacgaagatcccaaccaagcagtgcgagagtttgccaaagaaattgacgcatcctgcattaagattgaaaaagttataggagttggtgaatttggtgaggtatgcagtgggcgtctcaaagtgcctggcaagagagagatctgtgtggctatcaagactctgaaagctggttatacagacaaacagaggagagacttcctgagtgaggccagcatcatgggacagtttgaccatccgaacatcattcacttggaaggcgtggtcactaaatgtaaaccagtaatgatcataacagagtacatggagaatggctccttggatgcattcctcaggaaaaatgatggcagatttacagtcattcagctggtgggcatgcttcgtggcattgggtctgggatgaagtatttatctgatatgagctatgtgcatcgtgatctggccgcacggaacatcctggtgaacagcaacttggtctgcaaagtgtctgattttggcatgtcccgagtgcttgaggatgatccggaagcagcttacaccaccaggggtggcaagattcctatccggtggactgcgccagaagcaattgcctatcgtaaattcacatcagcaagtgatgtatggagctatggaatcgttatgtgggaagtgatgtcgtacggggagaggccctattgggatatgtccaatcaagatgtgattaaagccattgaggaaggctatcggttaccccctccaatggactgccccattgcgctccaccagctgatgctagactgctggcagaaggagaggagcgacaggcctaaatttgggcagattgtcaacatgttggacaaactcatccgcaaccccaacagcttgaagaggacagggacggagagctccagacctaacactgccttgttggatccaagctcccctgaattctctgctgtggtatcagtgggcgattggctccaggccattaaaatggaccggtataaggataacttcacagctgctggttataccacactagaggctgtggtgcacgtgaaccaggaggacctggcaagaattggtatcacagccatcacgcaccagaataagattttgagcagtgtccaggcaatgcgaacccaaatgcagcagatgcacggcagaatggttcccgtctgagccagtactgaataaactcaaaactcttgaaattagtttacctcatccatgcactttaattgaagaactgcactttttttacttcgtcttcgccctctgaaattaaagaaatgaaaaaaaaaaacaatatctgcagcgttgcttggtgcacagattgctgaaactgtggggcttacagaaatgactgccggtcatttgaatgagacctggaacaaatcgtttctcagaagtacttttctgttcatcaccagtctgtaaaatacatgtacctatagaaatagaacactgcctctgagttttgatgctgtatttgctgccagacactgagcttctgagacatccctgattctctctccatttggaattacaaccattgtattttgtttgtggcataaattacagtcatctgtctttcactggaatgaagaccatgcctaggaacattttttaaggactcagctgtggcttttagggcttggttcataccatgggggaaaaaaaagtcctaggagaaagcgacgtggctcattagtgttgcctcttcagtgctcaagccgcctggtggattcctatgacacagggggcctggaaagaaagggaaagtggatttaaaatatatatatacgtaacccaagccccataacccctaactggacaaatgaggtctgtttctttgggcctgaggctgtgccatataaagtcttattttgggactttacaaacttgtcctaactatcttgtggatagtgggctgtgacaatctggaatagagaacgttcacacttcgctcctttaaagaagcgaccccagatctgcaagggagtagattctgctatcttggcctcacagcccttcctgttgattacaaagcccgtggaagaaaacagaacacaccctcctcagttccgtctaaatgtgtttcttctgcttcaattacaccagttctggggcaaagacactgatgaaacaacacccatacctgaaaagaataaatgtgtgactttcaaatcccctttcgcagtgaaagaaacagcaaacacttaagattcagcatctgttctccagttgcactgaggaatgcactgtctcgcagcaccagctctgcagagcccttgccccagactctttgcggttttatttatatgtatttccatatttcattcctgtgtgtcactgctgcattggtgtggcagcaagtgaccaaatgctacaggtcttactatggacaccaggtcaggtgcaaccacacaaaacaaagccagttccatgagctgcctatgatatgcattgcggaagtaacattttacccagggtgtgccattgcagtgatataaatatatttttttcttagactaaatatgagctgactatctcttttgatgtgtgtacataggtgtgagtgtgtctgtatgcgtgcctgtctgtgtgcgggtgtgtgtatgtgcgtagcctcatgcttaggactacccatgaatgttgtggaatgctacacctggagagttctggttttccaccagtttcaagatgaagaactacatgatacagtggacctggagaccatccccttggaaagacaacccagagatgttcagcatcctgtatctacacgcatcctgtatctacacgtgtattttgtagctgtcacactaaccttaataagaattctacagctttggacagaggcattttcaccttaatggtgaagtaatttaaaatataaatccattcaggtgacaacccatcatcaaaattacaaattttctgattgaactcatctgaatcatcagttccttgatggagagagagaaggagatggaatgtgtctggtaaccccaaatggagtacaagtagcctttgttttcctgcataaatggacttgttgaatgcgaacgaatatatgcaattcatatacttttggagatgaacgtagatatgtgtgtcagctttgagatggtgtgtcctggattaatactttgtctcccaatatcacagaaaaatacatgccagtgactcttgaggttaaggtagttgggatgaaatggcctcaggcaatttcacattccctaattacctggaaagttctacagtaattaatatgcagctaactcctgttgccctcacaagagcatcagccttctagaatcggagctccggagtgtgaagattcagtattgatatgatatgtataccaaactccagccaacttactgccatttttcataatctgagtggctgccttgcttatcctaagctgtggttgcagaaaccgtggccatttatataagctataacatcaaatcagggaaaaatgagtatttattacattctgacagggtgtgtggcattgtgttctatgccagagtgacaaagttgattcacccctttttggggaccttaatatattttttaagggatgtgcctatgcattgatgcctgaaaaatatgtataaagaaatgaggttgactcttctgagcagttcatcttttccagaggtaagggtaggaggccaacttcagggtctgggtctgagcccgtgggcaagccctggccgagtgagctccaatgctaactcatgtgccgatctctagagcagtgggaaactaccccgctgcaccaaatcaagtagcttcaccttgtgtatgcaggccccaagttattttttagcaatcttacgagtgaaatgttctggtgggttgaaaaacgttcttattttaaagaaaggttgtgctcgctacactgctggtgtgtgcattctgagacctcttgtattcaatctgtgaaggatatgtgtattaatccgtacacccgtatagcctcaatatttgtctgaagacacttaaattctgacccataaaggaaagttctagaagcaatattttcacttatttaacattctccaaacaacatcaagcattgatacacactgaagagtgcgtttattttttgtatcactctaagtatgttggaatatgcaaggactgtggttcaaattagaatgtataaggcatattataatttagttcatactgaataagaaattaacagaacattgttcggttcacacgttccaaactttgagtgatttctggagttagacatagattttctattttgttttaatttgtcaaggtatttttcttcccttcatgaactttaggtacacataacttatgtcatttatttatggtcttttatacctagtttgtaaaattgtaaaatagcaaactaaatgcaaagagtttgcatttgaaaataataaagtagttgccgtatacaaccc

SEQ ID NO: 652 - DNA, 3813 bp, Homo sapiens
aagcggcaggagcagcgttggcaccggcgaaccatggctgggattttctatttcgccctattttcgtgtctcttcgggatttgcgacgctgtcacaggttccagggtataccccgcgaatgaagttaccttattggattccagatctgttcagggagaacttgggtggatagcaagccctctggaaggagggtgggaggaagtgagtatcatggatgaaaaaaatacaccaatccgaacctaccaagtgtgcaatgtgatggaacccagccagaataactggctacgaactgattggatcacccgagaaggggctcagagggtgtatattgagattaaattcaccttgagggactgcaatagtcttccgggcgtcatggggacttgcaaggagacgtttaacctgtactactatgaatcagacaacgacaaagagcgtttcatcagagagaaccagtttgtcaaaattgacaccattgctgctgatgagagcttcacccaagtggacattggtgacagaatcatgaagctgaacaccgagatccgggatgtagggccattaagcaaaaaggggttttacctggcttttcaggatgtgggggcctgcatcgccctggtatcagtccgtgtgttctataaaaagtgtccactcacagtccgcaatctggcccagtttcctgacaccatcacaggggctgatacgtcttccctggtggaagttcgaggctcctgtgtcaacaactcagaagagaaagatgtgccaaaaatgtactgtggggcagatggtgaatggctggtacccattggcaactgcctatgcaacgctgggcatgaggagcggagcggagaatgccaagcttgcaaaattggatattacaaggctctctccacggatgccacctgtgccaagtgcccaccccacagctactctgtctgggaaggagccacctcgtgcacctgtgaccgaggctttttcagagctgacaacgatgctgcctctatgccctgcacccgtccaccatctgctcccctgaacttgatttcaaatgtcaacgagacatctgtgaacttggaatggagtagccctcagaatacaggtggccgccaggacatttcctataatgtggtatgcaagaaatgtggagctggtgaccccagcaagtgccgaccctgtggaagtggggtccactacaccccacagcagaatggcttgaagaccaccaaagtctccatcactgacctcctagctcataccaattacacctttgaaatctgggctgtgaatggagtgtccaaatataaccctaacccagaccaatcagtttctgtcactgtgaccaccaaccaagcagcaccatcatccattgctttggtccaggctaaagaagtcacaagatacagtgtggcactggcttggctggaaccagatcggcccaatggggtaatcctggaatatgaagtcaagtattatgagaaggatcagaatgagcgaagctatcgtatagttcggacagctgccaggaacacagatatcaaaggcctgaaccctctcacttcctatgttttccacgtgcgagccaggacagcagctggctatggagacttcagtgagcccttggaggttacaaccaacacagtgccttcccggatcattggagatggggctaactccacagtccttctggtctctgtctcgggcagtgtggtgctggtggtaattctcattgcagcttttgtcatcagccggagacggagtaaatacagtaaagccaaacaagaagcggatgaagagaaacatttgaatcaaggtgtaagaacatatgtggacccctttacgtacgaagatcccaaccaagcagtgcgagagtttgccaaagaaattgacgcatcctgcattaagattgaaaaagttataggagttggtgaatttggtgaggtatgcagtgggcgtctcaaagtgcctggcaagagagagatctgtgtggctatcaagactctgaaagctggttatacagacaaacagaggagagacttcctgagtgaggccagcatcatgggacagtttgaccatccgaacatcattcacttggaaggcgtggtcactaaatgtaaaccagtaatgatcataacagagtacatggagaatggctccttggatgcattcctcaggaaaaatgatggcagatttacagtcattcagctggtgggcatgcttcgtggcattgggtctgggatgaagtatttatctgatatgagctatgtgcatcgtgatctggccgcacggaacatcctggtgaacagcaacttggtctgcaaagtgtctgattttggcatgtcccgagtgcttgaggatgatccggaagcagcttacaccaccaggggtggcaagattcctatccggtggactgcgccagaagcaattgcctatcgtaaattcacatcagcaagtgatgtatggagctatggaatcgttatgtgggaagtgatgtcgtacggggagaggccctattgggatatgtccaatcaagatgtgattaaagccattgaggaaggctatcggttaccccctccaatggactgccccattgcgctccaccagctgatgctagactgctggcagaaggagaggagcgacaggcctaaatttgggcagattgtcaacatgttggacaaactcatccgcaaccccaacagcttgaagaggacagggacggagagctccagacctaacactgccttgttggatccaagctcccctgaattctctgctgtggtatcagtgggcgattggctccaggccattaaaatggaccggtataaggataacttcacagctgctggttataccacactagaggctgtggtgcacgtgaaccaggaggacctggcaagaattggtatcacagccatcacgcaccagaataagattttgagcagtgtccaggcaatgcgaacccaaatgcagcagatgcacggcagaatggttcccgtctgagccagtactgaataaactcaaaactcttgaaattagtttacctcatccatgcactttaattgaagaactgcactttttttacttcgtcttcgccctctgaaattaaagaaatgaaaaaaaaaaacaatatctgcagcgttgcttggtgcacagattgctgaaactgtggggcttacagaaatgactgccggtcatttgaatgagacctggaacaaatcgtttctcagaagtacttttctgttcatcaccagtctgtaaaatacatgtacctatagaaatagaacactgcctctgagttttgatgctgtatttgctgccagacactgagcttctgagacatccctgattctctctccatttggaattacaaccattgtattttgtttgtggcataaattacagtcatctgtctttcactggaatgaagaccatgcctaggaacattttttaaggactcagctgtggcttttagggcttggttcataccatgggggaaaaaaaagtcctaggagaaagcgacgtggctcattagtgttgcctcttcagtgctcaagccgcctggtggattcctatgacacagggggcctggaaagaaagggaaagtggatttaaaatatatatatacgtaacccaagccccataacccctaactggacaaatgaggtctgtttctttgggcctgaggctgtgccatataaagtcttattttgggactttacaaacttgtcctaactatcttgtggatagtgggctgtgacaatctggaatagagaacgttcacacttcgctcctttaaagaagcgaccccagatctgcaag

SEQ ID NO: 653 - DNA, 3774 bp, Homo sapiens
atggccagagcccgcccgccgccgccgccgtcgacgacgccggggcttctgccgctgctccctccgctgctgctgctgacgtatttggaagaaccagtttgctcagcactgccctagaccctcatggacacaaaatgggtaacatctgagttggcgtggacgtctcatccagaaagtgggtgggaagaggtgagtggctacgatgaggccatgaatcccatccgcacataccaggtatgtaatgtgcgcgagtcaagccagaacaactggcttcgcacggggttcatctggcggcgggatgtgcagcgggtctacgtggagctcaagttcactgtgcgtgactgcaacagcatccccaacatccccggctcctgcaaggagaccttcaacctcttctactacgaggctgacagcgatgtggcctcagcctcctcccccttctggatggagaacccctacgtgaaagtggacaccattgcacccgatgagagcttctcgcggctggatgccggccgtgtcaacaccaaggtgcgcagctttgggccactttccaaggctggcttctacctggccttccaggaccagggcgcctgcatgtcgctcatctccgtgcgcgccttctacaagaagtgtgcatccaccaccgcaggcttcgcactcttccccgagaccctcactggggcggagcccacctcgctggtcattgctcctggcacctgcatccctaacgccgtggaggtgtcggtgccactcaagctctactgcaacggcgatggggagtggatggtgcctgtgggtgcctgcacctgtgccaccggccatgagccagctgccaaggagtcccagtgccgcccctgtccccctgggagctacaaggcgaagcagggagaggggccctgcctcccatgtccccccaacagccgtaccacctccccagccgccagcatctgcacctgccacaataacttctaccgtgcagactcggactctgcggacagtgcctgcaccaccgtgccatctccaccccgaggtgtgatctccaatgtgaatgaaacctcactgatcctcgagtggagtgagccccgggacctgggtggccgggatgacctcctgtacaatgtcatctgcaagaagtgccatggggctggaggggcctcagcctgctcacgctgtgatgacaacgtggagtttgtgcctcggcagctgggcctgacggagcgccgggtccacatcagccatctgctggcccacacgcgctacacctttgaggtgcaggcggtcaacggtgtctcgggcaagagccctctgccgcctcgttatgcggccgtgaatatcaccacaaaccaggctgccccgtctgaagtgcccacactacgcctgcacagcagctcaggcagcagcctcaccctatcctgggcacccccagagcggcccaacggagtcatcctggactacgagatgaagtactttgagaagagcgagggcatcgcctccacagtgaccagccagatgaactccgtgcagctggacgggcttcggcctgacgcccgctatgtggtccaggtccgtgcccgcacagtagctggctatgggcagtacagccgccctgccgagtttgagaccacaagtgagagaggctctggggcccagcagctccaggagcagcttcccctcatcgtgggctccgctacagctgggcttgtcttcgtggtggctgtcgtggtcatcgctatcgtctgcctcaggaagcagcgacacggctctgattcggagtacacggagaagctgcagcagtacattgctcctggaatgaaggtttatattgacccttttacctacgaggaccctaatgaggctgttcgggagtttgccaaggagatcgacgtgtcctgcgtcaagatcgaggaggtgatcggagctggggaatttggggaagtgtgccgtggtcgactgaaacagcctggccgccgagaggtgtttgtggccatcaagacgctgaaggtgggctacaccgagaggcagcggcgggacttcctaagcgaggcctccatcatgggtcagtttgatcaccccaatataatccggctcgagggcgtggtcaccaaaagtcggccagttatgatcctcactgagttcatggaaaactgcgccctggactccttcctccggctcaacgatgggcagttcacggtcatccagctggtgggcatgttgcggggcattgctgccggcatgaagtacctgtccgagatgaactatgtgcaccgcgacctggctgctcgcaacatccttgtcaacagcaacctggtctgcaaagtctcagactttggcctctcccgcttcctggaggatgacccctccgatcctacctacaccagttccctgggcgggaagatccccatccgctggactgccccagaggccatagcctatcggaagttcacttctgctagtgatgtctggagctacggaattgtcatgtgggaggtcatgagctatggagagcgaccctactgggacatgagcaaccaggatgtcatcaatgccgtggagcaggattaccggctgccaccacccatggactgtcccacagcactgcaccagctcatgctggactgctgggtgcgggaccggaacctcaggcccaaattctcccagattgtcaataccctggacaagctcatccgcaatgctgccagcctcaaggtcattgccagcgctcagtctggcatgtcacagcccctcctggaccgcacggtcccagattacacaaccttcacgacagttggtgattggctggatgccatcaagatggggcggtacaaggagagcttcgtcagtgcggggtttgcatcttttgacctggtggcccagatgacggcagaagacctgctccgtattggggtcaccctggccggccaccagaagaagatcctgagcagtatccaggacatgcggctgcagatgaaccagacgctgcctgtgcaggtctgacaccggctcccacggggaccctgaggaccgtgcagggatgccaagcagccggctggactttcggactcttggacttttggatgcctggccttaggctgtggcccagaagctggaagtttgggaaaggcccaagctgggacttctccaggcctgtgttccctccccaggaagtgcgccccaaacctcttcatattgaagatggattaggagagggggtgatgacccctccccaagcccctcagggcccagaccttcctgctctccagcaggggatccccacaacctcacacttgtctgttcttcagtgctggaggtcctggcagggtcaggctggggtaagccggggttccacagggcccagccctggcaggggtctggccccccaggtaggcggagagcagtccctccctcaggaactggaggaggggactccaggaatggggaaatgtgacaccaccatcctgaagccagcttgcacctccagtttgcacagggatttgttctgggggctgagggccctgtccccacccccgcccttggtgctgtcataaaagggcaggcaggggcaggctgaggagttgccctttgccccccagagactgactctcagagccagagatgggatgtgtgagtgtgtgtgtgtgtgtgtgcgcgcgcgcgcgcgtgtgtgtgtgcacgcactggcctgcacagagagcatgggtgagcgtgtaaaagcttggccctgtgccctacaatggggccagctgggccgacagcagaataaaggcaataagatga

SEQ ID NO: 654 - DNA, 4222 bp, Homo sapiens
tgagcggcgcagcaagatcccagctcggaccccggacggcgcgcgcccccgaagccccggatcccagtcgggcccgcagctgaccgccagattactgtgcatcccgaatcacgaccacctgcaccctcctgccccggcccgccccccaagtcctcaggcacccagctccccggcgccccggatcctcctggaccggtccgtccagattcccgcgggaccgacctgtccgcatccccaggaccgccgggctcggtgcaccgcctcggtcccggagccgcccgcctggattgcattccctcctctcctggatctcctgggacccgacgcgagcctgccccggagcccgccgagcgcaccctctctcgggtgcctgcagccccgccggcgcggcccggcccggcgcggcccggctcggctcctagagctgccacggccatggccagagcccgcccgccgccgccgccgtcgacgacgccggggcttctgccgctgctccctccgctgctgctgctccacagctgctgctgctgccactgcagcttcagcggctgctgcgagctgaaagaccctcatggacacaaaatgggtaacatctgagttggcgtggacgtctcatccagaaagtgggtgggaagaggtgagtggctacgatgaggccatgaatcccatccgcacataccaggtatgtaatgtgcgcgagtcaagccagaacaactggcttcgcacggggttcatctggcggcgggatgtgcagcgggtctacgtggagctcaagttcactgtgcgtgactgcaacagcatccccaacatccccggctcctgcaaggagaccttcaacctcttctactacgaggctgacagcgatgtggcctcagcctcctcccccttctggatggagaacccctacgtgaaagtggacaccattgcacccgatgagagcttctcgcggctggatgccggccgtgtcaacaccaaggtgcgcagctttgggccactttccaaggctggcttctacctggccttccaggaccagggcgcctgcatgtcgctcatctccgtgcgcgccttctacaagaagtgtgcatccaccaccgcaggcttcgcactcttccccgagaccctcactggggcggagcccacctcgctggtcattgctcctggcacctgcatccctaacgccgtggaggtgtcggtgccactcaagctctactgcaacggcgatggggagtggatggtgcctgtgggtgcctgcacctgtgccaccggccatgagccagctgccaaggagtcccagtgccgcccctgtccccctgggagctacaaggcgaagcagggagaggggccctgcctcccatgtccccccaacagccgtaccacctccccagccgccagcatctgcacctgccacaataacttctaccgtgcagactcggactctgcggacagtgcctgcaccaccgtgccatctccaccccgaggtgtgatctccaatgtgaatgaaacctcactgatcctcgagtggagtgagccccgggacctgggtggccgggatgacctcctgtacaatgtcatctgcaagaagtgccatggggctggaggggcctcagcctgctcacgctgtgatgacaacgtggagtttgtgcctcggcagctgggcctgacggagcgccgggtccacatcagccatctgctggcccacacgcgctacacctttgaggtgcaggcggtcaacggtgtctcgggcaagagccctctgccgcctcgttatgcggccgtgaatatcaccacaaaccaggctgccccgtctgaagtgcccacactacgcctgcacagcagctcaggcagcagcctcaccctatcctgggcacccccagagcggcccaacggagtcatcctggactacgagatgaagtactttgagaagagcgagggcatcgcctccacagtgaccagccagatgaactccgtgcagctggacgggcttcggcctgacgcccgctatgtggtccaggtccgtgcccgcacagtagctggctatgggcagtacagccgccctgccgagtttgagaccacaagtgagagaggctctggggcccagcagctccaggagcagcttcccctcatcgtgggctccgctacagctgggcttgtcttcgtggtggctgtcgtggtcatcgctatcgtctgcctcaggaagcagcgacacggctctgattcggagtacacggagaagctgcagcagtacattgctcctggaatgaaggtttatattgacccttttacctacgaggaccctaatgaggctgttcgggagtttgccaaggagatcgacgtgtcctgcgtcaagatcgaggaggtgatcggagctggggaatttggggaagtgtgccgtggtcgactgaaacagcctggccgccgagaggtgtttgtggccatcaagacgctgaaggtgggctacaccgagaggcagcggcgggacttcctaagcgaggcctccatcatgggtcagtttgatcaccccaatataatccggctcgagggcgtggtcaccaaaagtcggccagttatgatcctcactgagttcatggaaaactgcgccctggactccttcctccggctcaacgatgggcagttcacggtcatccagctggtgggcatgttgcggggcattgctgccggcatgaagtacctgtccgagatgaactatgtgcaccgcgacctggctgctcgcaacatccttgtcaacagcaacctggtctgcaaagtctcagactttggcctctcccgcttcctggaggatgacccctccgatcctacctacaccagttccctgggcgggaagatccccatccgctggactgccccagaggccatagcctatcggaagttcacttctgctagtgatgtctggagctacggaattgtcatgtgggaggtcatgagctatggagagcgaccctactgggacatgagcaaccaggatgtcatcaatgccgtggagcaggattaccggctgccaccacccatggactgtcccacagcactgcaccagctcatgctggactgctgggtgcgggaccggaacctcaggcccaaattctcccagattgtcaataccctggacaagctcatccgcaatgctgccagcctcaaggtcattgccagcgctcagtctggcatgtcacagcccctcctggaccgcacggtcccagattacacaaccttcacgacagttggtgattggctggatgccatcaagatggggcggtacaaggagagcttcgtcagtgcggggtttgcatcttttgacctggtggcccagatgacggcagaagacctgctccgtattggggtcaccctggccggccaccagaagaagatcctgagcagtatccaggacatgcggctgcagatgaaccagacgctgcctgtgcaggtctgacaccggctcccacggggaccctgaggaccgtgcagggatgccaagcagccggctggactttcggactcttggacttttggatgcctggccttaggctgtggcccagaagctggaagtttgggaaaggcccaagctgggacttctccaggcctgtgttccctccccaggaagtgcgccccaaacctcttcatattgaagatggattaggagagggggtgatgacccctccccaagcccctcagggcccagaccttcctgctctccagcaggggatccccacaacctcacacttgtctgttcttcagtgctggaggtcctggcagggtcaggctggggtaagccggggttccacagggcccagccctggcaggggtctggccccccaggtaggcggagagcagtccctccctcaggaactggaggaggggactccaggaatggggaaatgtgacaccaccatcctgaagccagcttgcacctccagtttgcacagggatttgttctgggggctgagggccctgtccccacccccgcccttggtgctgtcataaaagggcaggcaggggcaggctgaggagttgccctttgccccccagagactgactctcagagccagagatgggatgtgtgagtgtgtgtgtgtgtgtgtgcgcgcgcgcgcgcgtgtgtgtgtgcacgcactggcctgcacagagagcatgggtgagcgtgtaaaagcttggccctgtgccctacaatggggccagctgggccgacagcagaataaaggcaataagatga

SEQ ID NO: 655 - DNA, 6590 bp, Homo sapiens
attggagtgtggagcaagcggccggtctgcagtcggagacttgcaggcagcaaacacggtgcgagcgaacaggagtgggggggaaattaaaaaaagctaaacgtggagcagccgatcggggaccgagaaggggaatcgatgcaaggagcacaataaaacaaaagctacttcggaacaaacagcatttaaaaatccacgactcaagataactgaaacctaaaataaaacctgctcatgcaccatggtttttcaaactcggtacccttcatggattattttatgctacatctggctgctccgctttgcacacacaggggaggcgcaggctgcgaaggaagtactactgctggattctaaagcacaacaaacagagttggagtggatttcctctccacccaatgggtgggaagaaattagtggtttggatgagaactataccccgatacgaacataccaggtgtgccaagtcatggagcccaaccaaaacaactggctgcggactaactggatttccaaaggcaatgcacaaaggatttttgtagaattgaaattcaccctgagggattgtaacagtcttcctggagtactgggaacttgcaaggaaacatttaatttgtactattatgaaacagactatgacactggcaggaatataagagaaaacctctatgtaaaaatagacaccattgctgcagatgaaagttttacccaaggtgaccttggtgaaagaaagatgaagcttaacactgaggtgagagagattggacctttgtccaaaaagggattctatcttgcctttcaggatgtaggggcttgcatagctttggtttctgtcaaagtgtactacaagaagtgctggtccattattgagaacttagctatctttccagatacagtgactggttcagaattttcctctttagtcgaggttcgagggacatgtgtcagcagtgcagaggaagaagcggaaaacgcccccaggatgcactgcagtgcagaaggagaatggttagtgcccattggaaaatgtatctgcaaagcaggctaccagcaaaaaggagacacttgtgaaccctgtggccgtgggttctacaagtcttcctctcaagatcttcagtgctctcgttgtccaactcacagtttttctgataaagaaggctcctccagatgtgaatgtgaagatgggtattacagggctccatctgacccaccatacgttgcgtgcacaaggcctccatctgcaccacagaacctcattttcaacatcaaccaaaccacagtaagtttggaatggagtcctcctgcagacaatgggggaagaaacgatgtgacctacagaatattgtgtaagcggtgcagttgggagcagggcgaatgtgttccctgtgggagtaacattggatacatgccccagcagactggattagaggataactatgtcactgtcatggacctgctagcccacgctaattatacttttgaagttgaagctgtaaatggagtttctgacttaagccgatcccagaggctctttgctgctgtcagtatcaccactggtcaagcagctccctcgcaagtgagcggagtaatgaaggagagagtactgcagcggagtgtcgagctttcctggcaggaaccagagcatcccaatggagtcatcacagaatatgaaatcaagtattacgagaaagatcaaagggaacggacctactcaacagtaaaaaccaagtctacttcagcctccattaataatctgaaaccaggaacagtgtatgttttccagattcgggcttttactgctgctggttatggaaattacagtcccagacttgatgttgctacactagaggaagctacagctacagctgtctccagtgaacagaatcctgttattatcattgctgtggttgctgtagctgggaccatcattttggtgttcatggtctttggcttcatcattgggagaaggcactgtggttatagcaaagctgaccaagaaggcgatgaagagctttactttcattttaaatttccaggcaccaaaacctacattgaccctgaaacctatgaggacccaaatagagctgtccatcaattcgccaaggagctagatgcctcctgtattaaaattgagcgtgtgattggtgcaggagaattcggtgaagtctgcagtggccgtttgaaacttccagggaaaagagatgttgcagtagccataaaaaccctgaaagttggttacacagaaaaacaaaggagagactttttgtgtgaagcaagcatcatggggcagtttgaccacccaaatgttgtccatttggaaggggttgttacaagagggaaaccagtcatgatagtaatagagttcatggaaaatggagccctagatgcatttctcaggaaacatgatgggcaatttacagtcattcagttagtaggaatgctgagaggaattgctgctggaatgagatatttggctgatatgggatatgttcacagggaccttgcagctcgcaatattcttgtcaacagcaatctcgtttgtaaagtgtcagattttggcctgtcccgagttatagaggatgatccagaagctgtctatacaactactggtggaaaaattccagtaaggtggacagcacccgaagccatccagtaccggaaattcacatcagccagtgatgtatggagctatggaatagtcatgtgggaagttatgtcttatggagaaagaccttattgggacatgtcaaatcaagatgttataaaagcaatagaagaaggttatcgtttaccagcacccatggactgcccagctggccttcaccagctaatgttggattgttggcaaaaggagcgtgctgaaaggccaaaatttgaacagatagttggaattctagacaaaatgattcgaaacccaaatagtctgaaaactcccctgggaacttgtagtaggccaataagccctcttctggatcaaaacactcctgatttcactaccttttgttcagttggagaatggctacaagctattaagatggaaagatataaagataatttcacggcagctggctacaattcccttgaatcagtagccaggatgactattgaggatgtgatgagtttagggatcacactggttggtcatcaaaagaaaatcatgagcagcattcagactatgagagcacaaatgctacatttacatggaactggcattcaagtgtgatatgcatttctcccttttaagggagattacagactgcaagagaacagtactggccttcagtatatgcatagaatgctgctagaagacaagtgatgtcctgggtccttccaacagtgaagagaagatttaagaagcacctatagacttgaactcctaagtgccaccagaatatataaaaagggaatttaggatccaccatcggtggccaggaaaatagcagtgacaataaacaaagtactacctgaaaaacatccaaacaccttgagctctctaacctcctttttgtcttatagactttttaaaatgtacataaagaatttaagaaagaatatatttgtcaaataaaatcatgatcttattgttaaaattaatgaaatattttccttaaatatgtgatttcagactattcctttttaaaatcatttgtgtttattcttcataaggactttgttttagaaagctgtttatagctttggacctttttagtgttaaatctgtaacattactacactgggtacctttgaaagaatctcaaatttcaaaagaaatagcatgattgaagatacatctctgttagaacattggtatcctttttgtgccattttattctgtttaatcagtgctgttttgatattgtttgctaattggcaggtagtcaagaaaatgcaagttgccaagagctctgatattttttaaaaagaatttttttgtaaagatcagacaacacactatcttttcaatgaaaaaagcaataatgatccatacatactataaggcacttttaacagattgtttatagagtgattttactagaaagaatttaataaactcgaagtttaggtttatgagtatataaacaaatgaggcacttcatctgaagaatgttggtgaaggcaagtctctgaaagcagaactatccagtgttatctaaaaattaatctgagcacatcaagattttttcattctcgtgacattaggaaatttaggataaatagttgacatatattttatatcctcttctgttgaatgcagtccaaacatgaaaggaaataattgttttatattataactctgaagcatgataaaggggcagttcacaattttcaccatttaaacacaaatttgctgcacagaatatcaccattgcagttcaaaacaaaacaaaacaaaaagtcttttgtttgtgaacactgatgcaagaaacttgttaaatgaaaggactctttaccctagaaggaagaggtgaaggatctggcttgtttttaaagctttatttattaaaccatattatttgattactgtgttagaatttcataagcaataattaaatgtgtctttatagatattgcaggaatgtatacatattgtgattaatgctttcaaaacttatgaaaatcatgaactaccccagaattgaactgttgtacttccaaagagaattgggctgtttataatgattttaatagagaaagatcccagggatcggtcataattggtcttgtttgataatgtgggcatccacaaacaaacaaacaaataacagaaacaaaatctgtaaatgttcctttgtaaaacttgtaaattttatttatactgtcttgttttgtacacacatttctctgtagtgggctctgaatacattgaaaatgcactatatttttctattttacttgcagagcatcacaaaagaacaggtattttcagtgctacataatgtgttttcccacatttaggaccaaagacggctatagaaaaactcaaatggattgcttcccaaacccctccccaccctttttttttggttttaaatcactgtacagtgttatttgatattttaatttattttttgattgactagaaaaatcattttaatttcactaaaatgttttttgtccctaaggaaaagtaatctgtaaaaataattttaattagcataatacagtcacctagacacttccatttgtaatctttgtaatagactgtaaatatatttttggaactataacacaatgtgcttgagggttatttttcagtgtctgcagtgtgtacaagtgtttatactaagtccagcactttacaattctaatcagtagcattggcctttgtgagaatgagtgaaagagtttgagtgagtgttcttaattccttttggattctagactcactaataatgaagttcttttcttgttcatagcttaaggtgcttattttttctattaaaattaaattaacaaaagccattctagaaatagaagacatagtatggtacatgcaaacggtgtctttcctgcttttttctagcactagatttatagttgagtagtctttcttgagtagaagggcagaataaaagtttttttgagtttttttcaaaaataactttttccttcagcaatatacctcatctgccttaaattttttacagctctttacagggaaaggggagaagggatgggaaagacacacagcacaataggaagtgtatgattacatcactatctcgtttgtaagtttcttttcctaatcaacattatgatttcgaaatacatgtatgtgaaacaaatattaagagaaaaagaattaacattgtaatgctgattgtaatactctcttccagaaagagatgagatggtataacgataagaatgtacaacttgcaccttgaaatctttttttttaaataaattagtgctcaggggaggaaaagtagagaaagtgaacgtcaaaaatagaattccaaaattataaaaatgcaaaaggaaatggcctccttgctttaatagagccaccttttttagaacactgtcctcacacttgacctgtgttttgcattcagtactgaaataaaagtaacttgttctacatttgaatctaacattttctcagcaattgatctggtccttgtttactagaactggtggtttatgcttgtcagagcactattagttgaatcatattgtatacttatgtaatctacattagctagtactgtttaggactatattttaattgctcttcttatccgtgtttttaagacaattaaaatggtgtgattcacctctcttttttatttaggtaatgctgatattctcccttttgtttcttgagtagcctagaactatgctactcactgatgtgcatgttcaaataaattactgatgtgtatttttttgctatatgtggagaaatcatggggaactcggggcgagatgtgcttttcgttggttgaatttgtccctccttgcctaagaaatactacaggggtcatccttttataaggacaaactgcttttgaacagtgtcttcaatgtatcaagcacaaataactctttcttcaacatgaatcataagtctctttttaccagct

SEQ ID NO: 656 - DNA, 4176 bp, Homo sapiens
ctgcccggcccggcccgcccggctccgcgccgcagtctccctccctcccgctccgtccccgctcgggctcccaccatccccgcccgcgaggagagcactcggcccggcggcgcgagcagagccactccagggagggggggagaccgcgagcggccggctcagcccccgccacccggggcgggaccccgaggccccggagggaccccaactccagccacgtcttgctgcgcgcccgcccggcgcggccactgccagcacgctccgggcccgccgcccgcgcgcgcggcacagacgcggggccacacttggcgccgccgcccggtgccccgcacgctcgcatgggcccgcgctgagggccccgacgaggagtcccgcgcggagtatcggcgtccacccgcccagggagagtcagacctgggggggcgagggccccccaaactcagttcggatcctacccgagtgaggcggcgccatggagctccgggtgctgctctgctgggcttcgttggccgcagctttggaagagaccctgctgaacacaaaattggaaactgctgatctgaagtgggtgacattccctcaggtggacgggcagtgggaggaactgagcggcctggatgaggaacagcacagcgtgcgcacctacgaagtgtgtgacgtgcagcgtgccccgggccaggcccactggcttcgcacaggttgggtcccacggcggggcgccgtccacgtgtacgccacgctgcgcttcaccatgctcgagtgcctgtccctgcctcgggctgggcgctcctgcaaggagaccttcaccgtcttctactatgagagcgatgcggacacggccacggccctcacgccagcctggatggagaacccctacatcaaggtggacacggtggccgcggagcatctcacccggaagcgccctggggccgaggccaccgggaaggtgaatgtcaagacgctgcgtctgggaccgctcagcaaggctggcttctacctggccttccaggaccagggtgcctgcatggccctgctatccctgcacctcttctacaaaaagtgcgcccagctgactgtgaacctgactcgattcccggagactgtgcctcgggagctggttgtgcccgtggccggtagctgcgtggtggatgccgtccccgcccctggccccagccccagcctctactgccgtgaggatggccagtgggccgaacagccggtcacgggctgcagctgtgctccggggttcgaggcagctgaggggaacaccaagtgccgagcctgtgcccagggcaccttcaagcccctgtcaggagaagggtcctgccagccatgcccagccaatagccactctaacaccattggatcagccgtctgccagtgccgcgtcgggtacttccgggcacgcacagacccccggggtgcaccctgcaccacccctccttcggctccgcggagcgtggtttcccgcctgaacggctcctccctgcacctggaatggagtgcccccctggagtctggtggccgagaggacctcacctacgccctccgctgccgggagtgccgacccggaggctcctgtgcgccctgcgggggagacctgacttttgaccccggcccccgggacctggtggagccctgggtggtggttcgagggctacgtcctgacttcacctatacctttgaggtcactgcattgaacggggtatcctccttagccacggggcccgtcccatttgagcctgtcaatgtcaccactgaccgagaggtacctcctgcagtgtccgacatccgggtgacgcggtcctcacccagcagcttgagcctggcctgggctgttccccgggcacccagtggggctgtgctggactacgaggtcaaataccatgagaagggcgccgagggtcccagcagcgtgcggttcctgaagacgtcagaaaaccgggcagagctgcgggggctgaagcggggagccagctacctggtgcaggtacgggcgcgctctgaggccggctacgggcccttcggccaggaacatcacagccagacccaactggatgagagcgagggctggcgggagcagctggccctgattgcgggcacggcagtcgtgggtgtggtcctggtcctggtggtcattgtggtcgcagttctctgcctcaggaagcagagcaatgggagagaagcagaatattcggacaaacacggacagtatctcatcgggcatggtactaaggtctacatcgaccccttcacttatgaagaccctaatgaggctgtgagggaatttgcaaaagagatcgatgtctcctacgtcaagattgaagaggtgattggtgcaggtgagtttggcgaggtgtgccgggggcggctcaaggccccagggaagaaggagagctgtgtggcaatcaagaccctgaagggtggctacacggagcggcagcggcgtgagtttctgagcgaggcctccatcatgggccagttcgagcaccccaatatcatccgcctggagggcgtggtcaccaacagcatgcccgtcatgattctcacagagttcatggagaacggcgccctggactccttcctgcggctaaacgacggacagttcacagtcatccagctcgtgggcatgctgcggggcatcgcctcgggcatgcggtaccttgccgagatgagctacgtccaccgagacctggctgctcgcaacatcctagtcaacagcaacctcgtctgcaaagtgtctgactttggcctttcccgattcctggaggagaactcttccgatcccacctacacgagctccctgggaggaaagattcccatccgatggactgccccggaggccattgccttccggaagttcacttccgccagtgatgcctggagttacgggattgtgatgtgggaggtgatgtcatttggggagaggccgtactgggacatgagcaatcaggacgtgatcaatgccattgaacaggactaccggctgcccccgcccccagactgtcccacctccctccaccagctcatgctggactgttggcagaaagaccggaatgcccggccccgcttcccccaggtggtcagcgccctggacaagatgatccggaaccccgccagcctcaaaatcgtggcccgggagaatggcggggacctgctccgaatcggagtcactctggcgggacaccagaagaaaatcttggccagtgtccagcacatgaagtcccaggccaagccgggaaccccgggtgggacaggaggaccggccccgcagtactgacctgcaggaactccccaccccagggacaccgcctccccattttccggggcagagtggggactcacagaggcccccagccctgtgccccgctggattgcactttgagcccgtggggtgaggagttggcaatttggagagacaggatttgggggttctgccataataggaggggaaaatcaccccccagccacctcggggaactccagaccaagggtgagggcgcctttccctcaggactgggtgtgaccagaggaaaaggaagtgcccaacatctcccagcctccccaggtgcccccctcaccttgatgggtgcgttcccgcagaccaaagagagtgtgactcccttgccagctccagagtgggggggctgtcccagggggcaagaaggggtgtcagggcccagtgacaaaatcattggggtttgtagtcccaacttgctgctgtcaccaccaaactcaatcatttttttcccttgtaaatgcccctcccccagctgctgccttcatattgaaggtttttgagttttgtttttggtcttaatttttctccccgttccctttttgtttcttcgttttgtttttctaccgtccttgtcataactttgtgttggagggaacctgtttcactatggcctcctttgcccaagttgaaacaggggcccatcatcatgtctgtttccagaacagtgccttggtcatcccacatccccggaccccgcctgggacccccaagctgtgtcctatgaaggggtgtggggtgaggtagtgaaaagggcggtagttggtggtggaacccagaaacggacgccggtgcttggaggggttcttaaattatatttaaaaaagtaactttttgtataaataaaagaaaatgggacgtgtcccagctccaggggt

SEQ ID NO: 657 - DNA, 3869 bp, Homo sapiens
ttttttcacgtgtgaaaacatctattggggaaatggaaaaatcatttgacctcatattcctcatagctgacatgacaaaaccaaaatgtggtggtgagccaacttcaattttgcagaaactgacttggaaagaactgattacctgaaggaccgtgaggatcaaagttgtcccactgaccaggctgtaaactttggaactgataagtgagagagataagaaacgttaatggacaccagaacggctactgcagagctgggctggacggccaatcctgcgtccgggtgggaagaagtcagtggctacgatgaaaacctgaacaccatccgcacctaccaggtgtgcaatgtcttcgagcccaaccagaacaattggctgctcaccaccttcatcaaccggcggggggcccatcgcatctacacagagatgcgcttcactgtgagagactgcagcagcctccctaatgtcccaggatcctgcaaggagaccttcaacttgtattactatgagactgactctgtcattgccaccaagaagtcagccttctggtctgaggccccctacctcaaagtagacaccattgctgcagatgagagcttctcccaggtggactttgggggaaggctgatgaaggtaaacacagaagtcaggagctttgggcctcttactcggaatggtttttacctcgcttttcaggattatggagcctgtatgtctcttctttctgtccgtgtcttcttcaaaaagtgtcccagcattgtgcaaaattttgcagtgtttccagagactatgacaggggcagagagcacatctctggtgattgctcggggcacatgcatccccaacgcagaggaagtggacgtgcccatcaaactctactgcaacggggatggggaatggatggtgcctattgggcgatgcacctgcaagcctggctatgagcctgagaacagcgtggcatgcaaggcttgccctgcagggacattcaaggccagccaggaagctgaaggctgctcccactgcccctccaacagccgctcccctgcagaggcgtctcccatctgcacctgtcggaccggttattaccgagcggactttgaccctccagaagtggcatgcactagcgtcccatcaggtccccgcaatgttatctccatcgtcaatgagacgtccatcattctggagtggcaccctccaagggagacaggtgggcgggatgatgtgacctacaacatcatctgcaaaaagtgccgggcagaccgccggagctgctcccgctgtgacgacaatgtggagtttgtgcccaggcagctgggcctgacggagtgccgcgtctccatcagcagcctgtgggcccacaccccctacacctttgacatccaggccatcaatggagtctccagcaagagtcccttccccccacagcacgtctctgtcaacatcaccacaaaccaagccgccccctccaccgttcccatcatgcaccaagtcagtgccactatgaggagcatcaccttgtcatggccacagccggagcagcccaatggcatcatcctggactatgagatccggtactatgagaaggaacacaatgagttcaactcctccatggccaggagtcagaccaacacagcaaggattgatgggctgcggcctggcatggtatatgtggtacaggtgcgtgcccgcactgttgctggctacggcaagttcagtggcaagatgtgcttccagactctgactgacgatgattacaagtcagagctgagggagcagctgcccctgattgctggctcggcagcggccggggtcgtgttcgttgtgtccttggtggccatctctatcgtctgtagcaggaaacgggcttatagcaaagaggctgtgtacagcgataagctccagcattacagcacaggccgaggctccccagggatgaagatctacattgaccccttcacttacgaggatcccaacgaagctgtccgggagtttgccaaggagattgatgtatcttttgtgaaaattgaagaggtcatcggagcaggggagtttggagaagtgtacaaggggcgtttgaaactgccaggcaagagggaaatctacgtggccatcaagaccctgaaggcagggtactcggagaagcagcgtcgggactttctgagtgaggcgagcatcatgggccagttcgaccatcctaacatcattcgcctggagggtgtggtcaccaagagtcggcctgtcatgatcatcacagagttcatggagaatggtgcattggattctttcctcaggcaaaatgacgggcagttcaccgtgatccagcttgtgggtatgctcaggggcatcgctgctggcatgaagtacctggctgagatgaattatgtgcatcgggacctggctgctaggaacattctggtcaacagtaacctggtgtgcaaggtgtccgactttggcctctcccgctacctccaggatgacacctcagatcccacctacaccagctccttgggagggaagatccctgtgagatggacagctccagaggccatcgcctaccgcaagttcacttcagccagcgacgtttggagctatgggatcgtcatgtgggaagtcatgtcatttggagagagaccctattgggatatgtccaaccaagatgtcatcaatgccatcgagcaggactaccggctgcccccacccatggactgtccagctgctctacaccagctcatgctggactgttggcagaaggaccggaacagccggccccggtttgcggagattgtcaacaccctagataagatgatccggaacccggcaagtctcaagactgtggcaaccatcaccgccgtgccttcccagcccctgctcgaccgctccatcccagacttcacggcctttaccaccgtggatgactggctcagcgccatcaaaatggtccagtacagggacagcttcctcactgctggcttcacctccctccagctggtcacccagatgacatcagaagacctcctgagaataggcatcaccttggcaggccatcagaagaagatcctgaacagcattcattctatgagggtccagataagtcagtcaccaacggcaatggcatgagaactcttgtttcttggggaaggagaggagggaaaaggaccagggtcaagggggaccaaatatataataataaaaatataaaaaggtgatgttcaacagaagtgaagacaaaacaatatgcatcaggagaacaagagtaaacccagctcccactctcagtgggctgcagttgcccaaccacaggaagaaagggaaggaggtagagggaagaaacagaagcagtgttccattttcttcctcaccaatgacattcttttcttttctcctttcgtactcctccctgagagtcccctcccttctcccacactcgtttccctttgctcatgactcctgtagggaagtttcttcaaacaaaacccagctcctgagtctccagatgttgttctgtcagttgccaaaggactttgctgaccactgcatggggatccaaccaattcaattaatgtcttcatattgaagaagagatgtaccttcaattgaaaacctcgtttttcttttgtttgcattttctgcaaaaaggaaaaagaaaccacaaattggggaaaaaaaaagaagaaaaacctgtttccgtgtgcaaaagcacacatatgtatgtctgtgttataaaatgactgtgcttgttcgtaacagatgcaaacaagaaagaagaactgggaagtctttgtccctaggaaatccaaaggggctggaatatggtgttggtttggctttctggttggcccaatcggcctattggctcaatgggaagagagga

SEQ ID NO: 658 - DNA, 5234 bp, Homo sapiens
ccctggccccccgagcccggggcgcgcgctcccgcccgggccgtccgggccccgcggcgccgcggcccgaggccccgggaagcgcagccatggctctgcggaggctgggggccgcgctgctgctgctgccgctgctcgccgccgtggaagaaacgctaatggactccactacagcgactgctgagctgggctggatggtgcatcctccatcagggtgggaagaggtgagtggctacgatgagaacatgaacacgatccgcacgtaccaggtgtgcaacgtgtttgagtcaagccagaacaactggctacggaccaagtttatccggcgccgtggcgcccaccgcatccacgtggagatgaagttttcggtgcgtgactgcagcagcatccccagcgtgcctggctcctgcaaggagaccttcaacctctattactatgaggctgactttgactcggccaccaagaccttccccaactggatggagaatccatgggtgaaggtggataccattgcagccgacgagagcttctcccaggtggacctgggtggccgcgtcatgaaaatcaacaccgaggtgcggagcttcggacctgtgtcccgcagcggcttctacctggccttccaggactatggcggctgcatgtccctcatcgccgtgcgtgtcttctaccgcaagtgcccccgcatcatccagaatggcgccatcttccaggaaaccctgtcgggggctgagagcacatcgctggtggctgcccggggcagctgcatcgccaatgcggaagaggtggatgtacccatcaagctctactgtaacggggacggcgagtggctggtgcccatcgggcgctgcatgtgcaaagcaggcttcgaggccgttgagaatggcaccgttctctcaggttgtccatctgggactttcaaggccaaccaaggggatgaggcctgtacccactgtcccatcaacagccggaccacttctgaaggggccaccaactgtgtctgccgcaatggctactacagagcagacctggaccccctggacatgccctgcacaaccatcccctccgcgccccaggctgtgatttccagtgtcaatgagacctccctcatgctggagtggacccctccccgcgactccggaggccgagaggacctcgtctacaacatcatctgcaagagctgtggctcgggccggggtgcctgcacccgctgcggggacaatgtacagtacgcaccacgccagctaggcctgaccgagccacgcatttacatcagtgacctgctggcccacacccagtacaccttcgagatccaggctgtgaacggcgttactgaccagagccccttctcgcctcagttcgcctctgtgaacatcaccaccaaccaggcagctccatcggcagtgtccatcatgcatcaggtgagccgcaccgtggacagcattaccctgtcgtggtcccagccggaccagcccaatggcgtgatcctggactatgagctgcagtactatgagaaggagctcagtgagtacaacgccacagccataaaaagccccaccaacacggtcaccgtgcagggcctcaaagccggcgccatctatgtcttccaggtgcgggcacgcaccgtggcaggctacgggcgctacagcggcaagatgtacttccagaccatgacagaagccgagtaccagacaagcatccaggagaagttgccactcatcatcggctcctcggccgctggcctggtcttcctcattgctgtggttgtcatcgccatcgtgtgtaacagaagacgggggtttgagcgtgctgactcggagtacacggacaagctgcaacactacaccagtggccacatgaccccaggcatgaagatctacatcgatcctttcacctacgaggaccccaacgaggcagtgcgggagtttgccaaggaaattgacatctcctgtgtcaaaattgagcaggtgatcggagcaggggagtttggcgaggtctgcagtggccacctgaagctgccaggcaagagagagatctttgtggccatcaagacgctcaagtcgggctacacggagaagcagcgccgggacttcctgagcgaagcctccatcatgggccagttcgaccatcccaacgtcatccacctggagggtgtcgtgaccaagagcacacctgtgatgatcatcaccgagttcatggagaatggctccctggactcctttctccggcaaaacgatgggcagttcacagtcatccagctggtgggcatgcttcggggcatcgcagctggcatgaagtacctggcagacatgaactatgttcaccgtgacctggctgcccgcaacatcctcgtcaacagcaacctggtctgcaaggtgtcggactttgggctctcacgctttctagaggacgatacctcagaccccacctacaccagtgccctgggcggaaagatccccatccgctggacagccccggaagccatccagtaccggaagttcacctcggccagtgatgtgtggagctacggcattgtcatgtgggaggtgatgtcctatggggagcggccctactgggacatgaccaaccaggatgtaatcaatgccattgagcaggactatcggctgccaccgcccatggactgcccgagcgccctgcaccaactcatgctggactgttggcagaaggaccgcaaccaccggcccaagttcggccaaattgtcaacacgctagacaagatgatccgcaatcccaacagcctcaaagccatggcgcccctctcctctggcatcaacctgccgctgctggaccgcacgatccccgactacaccagctttaacacggtggacgagtggctggaggccatcaagatggggcagtacaaggagagcttcgccaatgccggcttcacctcctttgacgtcgtgtctcagatgatgatggaggacattctccgggttggggtcactttggctggccaccagaaaaaaatcctgaacagtatccaggtgatgcgggcgcagatgaaccagattcagtctgtggaggtttgacattcacctgcctcggctcacctcttcctccaagccccgccccctctgccccacgtgccggccctcctggtgctctatccactgcagggccagccactcgccaggaggccacgggccacgggaagaaccaagcggtgccagccacgagacgtcaccaagaaaacatgcaactcaaacgacggaaaaaaaaagggaatgggaaaaaagaaaacagatcctgggagggggcgggaaatacaaggaatattttttaaagaggattctcataaggaaagcaatgactgttcttgcgggggataaaaaagggcttgggagattcatgcgatgtgtccaatcggagacaaaagcagtttctctccaactccctctgggaaggtgacctggccagagccaagaaacactttcagaaaaacaaatgtgaaggggagagacaggggccgcccttggctcctgtccctgctgctcctctaggcctcactcaacaaccaagcgcctggaggacgggacagatggacagacagccaccctgagaacccctctgggaaaatctattcctgccaccactgggcaaacagaagaatttttctgtctttggagagtattttagaaactccaatgaaagacactgtttctcctgttggctcacagggctgaaaggggcttttgtcctcctgggtcagggagaacgcggggaccccagaaaggtcagccttcctgaggatgggcaacccccaggtctgcagctccaggtacatatcacgcgcacagcctggcagcctggccctcctggtgcccactcccgccagcccctgcctcgaggactgatactgcagtgactgccgtcagctccgactgccgctgagaagggttgatcctgcatctgggtttgtttacagcaattcctggactcgggggtattttggtcacagggtggttttggtttagggggtttgtttgttgggttgttttttgttttttggttttttttaatgacaatgaagtgacactttgacatttcctaccttttgaggacttgatccttctccaggaagaaggtgctttctgcttactgacttaggcaatacaccaagggcgagattttatatgcacatttctggatttttttatacggttttcattgacactcttccctcctcccacctgccaccaggcctcaccaaagcccactgccatggggccatctgggccattcagagactggagtgagatttgggtgtggagggggaggcgccaaggtggaggagcttcccactccaggactgttgatgaaagggacagattgaggaggaagtgggctctgaggctgcagggctggaagtccttgcccacttcccactctcctgccccaatctatctagtacttcccaggcaaataggcccctttgaggctcctgagtgccctcagatggtcaaaacccagttttccctctgggagcctaaaccaggctgcatcggaggccaggacccggatcattcactgtgataccctgccctccagagggtgcgctcagagacacgggcaagcatgcctcttcccttccctggagagaaagtgtgtgatttctctcccacctccttccccccaccagacctttgctgggcctaaaggtcttggccatggggacgccctcagtctagggatctggccacagactccctcctgtgaaccaacacagacacccaagcagagcaatcagttagtgattggttccaagtctttgctattgtgaatagtgccgcaataaacatatgtgtgcatgtgtctttatagcagccagatttataatcctttgggtatatactcagtaatgggattgctgggtcaaatggcatttctagttctagatccctgaggaatcgccacaccgacttccacaatggttgaactagtttacagtcccaccaacagtgtaaaagtgttcctatttctccacatcctctccagcacctgttgtttcctgactttttaatgatcgccattctaactggtttgagatggtatctcactgtggttttgatttgcatttctctgatggccagtgatgatgagcattttttcatgtgttttttggctgcataaatggcttcttttgagaagtgtctgttcatatccttcgcccactttttgatggggttgtttgtttttttcttgtaaatttg

SEQ ID NO: 659 - DNA, 1594 bp, Homo sapiens
aacaaaatacagacaaacaaaactacaatggaagaagaaaacgtcctcaactagacatctgccaaaaatatcatccagaatgccctggcaagttcacttccatttagtgaagtgagataatttggcaattcacgcaagagactgagaaccaagcctcaagccctgcctctgattctgcaggtatggaacatgagcagctgacctactcttccacaaggtccaaagcccccagtgtcatcatcacaggtcttaagccagccaccaaatatgtatttcacatccgagtgagaactgcgacaggatacagtggctacagtcagaaatttgaatttgaaacaggagatgaaagactctccatttcaagtgacaaaactgtactggcttaatgaaaagtgggactttattgcctcagcttctgacatggcagcagaacaaggacagattctcgtgatagccaccgccgctgttggcggattcactctcctcgtcatcctcactttattcttcttgatcactgggagatgtcagtggtacataaaagccaagatgaagtcagaagagaagagaagaaaccacttacagaatgggcatttgcgcttcccgggaattaaaacttacattgatccagatacatatgaagacccatccctagcagtccatgaatttgcaaaggagattgatccctcaagaattcgtattgagagagtcattggggcaggtgaatttggagaagtctgtagtgggcgtttgaagacaccagggaaaagagagatcccagttgccattaaaactttgaaaggtggccacatggatcggcaaagaagagattttctaagagaagctagtatcatgggccagtttgaccatccaaacatcattcgcctagaaggggttgtcaccaaaagatccttcccggccattggggtggaggcgttttgccccagcttcctgagggcagggtttttaaatagcatccaggccccgcatccagtgccagggggaggatctttgccccccaggattcctgctggcagaccagtaatgattgtggtggaatatatggagaatggatccctagactcctttttgcggaagcatgatggccacttcacagtcatccagttggtcggaatgctccgaggcattgcatcaggcatgaagtatctttctgatatgggttatgttcatcgagacctagcggctcggaatatactggtcaatagcaacttagtatgcaaagtttctgattttggtctctccagagtgctggaagatgatccagaagctgcttatacaacaactgacctcttccaaactctaacacttaacctctgctattctgcataaattctgagaaaagccaaattttctgtcggtctaagaagacatagcctacacccaacatggagataattataaaaaataatgaagcagcatgaggggaaggtatttaatgtgtattttaaagttgggagagattctccttcacctaatttaggtgtttgtgaattggcttgactttttgaagttaatttttaagccttgaacatgtccaactttaagaactttaagaataaatattttaacacaagtg

SEQ ID NO: 660 - DNA, 4395 bp, Homo sapiens
ccctggccccccgagcccggggcgcgcgctcccgcccgggccgtccgggccccgcggcgccgcggcccgaggccccgggaagcgcagccatggctctgcggaggctgggggccgcgctgctgctgctgccgctgctcgccgccgtggaagaaacgctaatggactccactacagcgactgctgagctgggctggatggtgcatcctccatcagggtgggaagaggtgagtggctacgatgagaacatgaacacgatccgcacgtaccaggtgtgcaacgtgtttgagtcaagccagaacaactggctacggaccaagtttatccggcgccgtggcgcccaccgcatccacgtggagatgaagttttcggtgcgtgactgcagcagcatccccagcgtgcctggctcctgcaaggagaccttcaacctctattactatgaggctgactttgactcggccaccaagaccttccccaactggatggagaatccatgggtgaaggtggataccattgcagccgacgagagcttctcccaggtggacctgggtggccgcgtcatgaaaatcaacaccgaggtgcggagcttcggacctgtgtcccgcagcggcttctacctggccttccaggactatggcggctgcatgtccctcatcgccgtgcgtgtcttctaccgcaagtgcccccgcatcatccagaatggcgccatcttccaggaaaccctgtcgggggctgagagcacatcgctggtggctgcccggggcagctgcatcgccaatgcggaagaggtggatgtacccatcaagctctactgtaacggggacggcgagtggctggtgcccatcgggcgctgcatgtgcaaagcaggcttcgaggccgttgagaatggcaccgtctgccgaggttgtccatctgggactttcaaggccaaccaaggggatgaggcctgtacccactgtcccatcaacagccggaccacttctgaaggggccaccaactgtgtctgccgcaatggctactacagagcagacctggaccccctggacatgccctgcacaaccatcccctccgcgccccaggctgtgatttccagtgtcaatgagacctccctcatgctggagtggacccctccccgcgactccggaggccgagaggacctcgtctacaacatcatctgcaagagctgtggctcgggccggggtgcctgcacccgctgcggggacaatgtacagtacgcaccacgccagctaggcctgaccgagccacgcatttacatcagtgacctgctggcccacacccagtacaccttcgagatccaggctgtgaacggcgttactgaccagagccccttctcgcctcagttcgcctctgtgaacatcaccaccaaccaggcagctccatcggcagtgtccatcatgcatcaggtgagccgcaccgtggacagcattaccctgtcgtggtcccagccggaccagcccaatggcgtgatcctggactatgagctgcagtactatgagaaggagctcagtgagtacaacgccacagccataaaaagccccaccaacacggtcaccgtgcagggcctcaaagccggcgccatctatgtcttccaggtgcgggcacgcaccgtggcaggctacgggcgctacagcggcaagatgtacttccagaccatgacagaagccgagtaccagacaagcatccaggagaagttgccactcatcatcggctcctcggccgctggcctggtcttcctcattgctgtggttgtcatcgccatcgtgtgtaacagacgggggtttgagcgtgctgactcggagtacacggacaagctgcaacactacaccagtggccacatgaccccaggcatgaagatctacatcgatcctttcacctacgaggaccccaacgaggcagtgcgggagtttgccaaggaaattgacatctcctgtgtcaaaattgagcaggtgatcggagcaggggagtttggcgaggtctgcagtggccacctgaagctgccaggcaagagagagatctttgtggccatcaagacgctcaagtcgggctacacggagaagcagcgccgggacttcctgagcgaagcctccatcatgggccagttcgaccatcccaacgtcatccacctggagggtgtcgtgaccaagagcacacctgtgatgatcatcaccgagttcatggagaatggctccctggactcctttctccggcaaaacgatgggcagttcacagtcatccagctggtgggcatgcttcggggcatcgcagctggcatgaagtacctggcagacatgaactatgttcaccgtgacctggctgcccgcaacatcctcgtcaacagcaacctggtctgcaaggtgtcggactttgggctctcacgctttctagaggacgatacctcagaccccacctacaccagtgccctgggcggaaagatccccatccgctggacagccccggaagccatccagtaccggaagttcacctcggccagtgatgtgtggagctacggcattgtcatgtgggaggtgatgtcctatggggagcggccctactgggacatgaccaaccaggatgtaatcaatgccattgagcaggactatcggctgccaccgcccatggactgcccgagcgccctgcaccaactcatgctggactgttggcagaaggaccgcaaccaccggcccaagttcggccaaattgtcaacacgctagacaagatgatccgcaatcccaacagcctcaaagccatggcgcccctctcctctggcatcaacctgccgctgctggaccgcacgatccccgactacaccagctttaacacggtggacgagtggctggaggccatcaagatggggcagtacaaggagagcttcgccaatgccggcttcacctcctttgacgtcgtgtctcagatgatgatggaggacattctccgggttggggtcactttggctggccaccagaaaaaaatcctgaacagtatccaggtgatgcgggcgcagatgaaccagattcagtctgtggagggccagccactcgccaggaggccacgggccacgggaagaaccaagcggtgccagccacgagacgtcaccaagaaaacatgcaactcaaacgacggaaaaaaaaagggaatgggaaaaaagaaaacagatcctgggagggggcgggaaatacaaggaatattttttaaagaggattctcataaggaaagcaatgactgttcttgcgggggataaaaaagggcttgggagattcatgcgatgtgtccaatcggagacaaaagcagtttctctccaactccctctgggaaggtgacctggccagagccaagaaacactttcagaaaaacaaatgtgaaggggagagacaggggccgcccttggctcctgtccctgctgctcctctaggcctcactcaacaaccaagcgcctggaggacgggacagatggacagacagccaccctgagaacccctctgggaaaatctattcctgccaccactgggcaaacagaagaatttttctgtctttggagagtattttagaaactccaatgaaagacactgtttctcctgttggctcacagggctgaaaggggcttttgtcctcctgggtcagggagaacgcggggaccccagaaaggtcagccttcctgaggatgggcaacccccaggtctgcagctccaggtacatatcacgcgcacagcctggcagcctggccctcctggtgcccactcccgccagcccctgcctcgaggactgatactgcagtgactgccgtcagctccgactgccgctgagaagggttgatcctgcatctgggtttgtttacagcaattcctggactcgggggtattttggtcacagggtggttttggtttagggggtttgtttgttgggttgttttttgttttttggttttttttaatgacaatgaagtgacactttgacatttcctaccttttgaggacttgatccttctccaggaagaaggtgctttctgcttactgacttaggcaatacaccaagggcgagattttatatgcacatttctggatttttttatacggttttcattgacactcttccctcctcccacctgccaccaggcctcaccaaagcccactgccatggggccatctgggccattcagagactggagtgagatttgggtgtggagggggaggcgccaaggtggaggagcttcccactccaggactgttgatgaaagggacagattgaggaggaagtgggctctgaggctgcagggctggaagtccttgcccacttcccactctcctgccccaatctatctagtacttcccaggcaaataggcccctttgaggctcctgagtgccctcagatggtcaaaacc

SEQ ID NO: 661 - DNA, 5234 bp, Homo sapiens
ccctggccccccgagcccggggcgcgcgctcccgcccgggccgtccgggccccgcggcgccgcggcccgaggccccgggaagcgcagccatggctctgcggaggctgggggccgcgctgctgctgctgccgctgctcgccgccgtggaagaaacgctaatggactccactacagcgactgctgagctgggctggatggtgcatcctccatcagggtgggaagaggtgagtggctacgatgagaacatgaacacgatccgcacgtaccaggtgtgcaacgtgtttgagtcaagccagaacaactggctacggaccaagtttatccggcgccgtggcgcccaccgcatccacgtggagatgaagttttcggtgcgtgactgcagcagcatccccagcgtgcctggctcctgcaaggagaccttcaacctctattactatgaggctgactttgactcggccaccaagaccttccccaactggatggagaatccatgggtgaaggtggataccattgcagccgacgagagcttctcccaggtggacctgggtggccgcgtcatgaaaatcaacaccgaggtgcggagcttcggacctgtgtcccgcagcggcttctacctggccttccaggactatggcggctgcatgtccctcatcgccgtgcgtgtcttctaccgcaagtgcccccgcatcatccagaatggcgccatcttccaggaaaccctgtcgggggctgagagcacatcgctggtggctgcccggggcagctgcatcgccaatgcggaagaggtggatgtacccatcaagctctactgtaacggggacggcgagtggctggtgcccatcgggcgctgcatgtgcaaagcaggcttcgaggccgttgagaatggcaccgtctgccgaggttgtccatctgggactttcaaggccaaccaaggggatgaggcctgtacccactgtcccatcaacagccggaccacttctgaaggggccaccaactgtgtctgccgcaatggctactacagagcagacctggaccccctggacatgccctgcacaaccatcccctccgcgccccaggctgtgatttccagtgtcaatgagacctccctcatgctggagtggacccctccccgcgactccggaggccgagaggacctcgtctacaacatcatctgcaagagctgtggctcgggccggggtgcctgcacccgctgcggggacaatgtacagtacgcaccacgccagctaggcctgaccgagccacgcatttacatcagtgacctgctggcccacacccagtacaccttcgagatccaggctgtgaacggcgttactgaccagagccccttctcgcctcagttcgcctctgtgaacatcaccaccaaccaggcagctccatcggcagtgtccatcatgcatcaggtgagccgcaccgtggacagcattaccctgtcgtggtcccagccggaccagcccaatggcgtgatcctggactatgagctgcagtactatgagaaggagctcagtgagtacaacgccacagccataaaaagccccaccaacacggtcaccgtgcagggcctcaaagccggcgccatctatgtcttccaggtgcgggcacgcaccgtggcaggctacgggcgctacagcggcaagatgtacttccagaccatgacagaagccgagtaccagacaagcatccaggagaagttgccactcatcatcggctcctcggccgctggcctggtcttcctcattgctgtggttgtcatcgccatcgtgtgtaacagaagacgggggtttgagcgtgctgactcggagtacacggacaagctgcaacactacaccagtggccacatgaccccaggcatgaagatctacatcgatcctttcacctacgaggaccccaacgaggcagtgcgggagtttgccaaggaaattgacatctcctgtgtcaaaattgagcaggtgatcggagcaggggagtttggcgaggtctgcagtggccacctgaagctgccaggcaagagagagatctttgtggccatcaagacgctcaagtcgggctacacggagaagcagcgccgggacttcctgagcgaagcctccatcatgggccagttcgaccatcccaacgtcatccacctggagggtgtcgtgaccaagagcacacctgtgatgatcatcaccgagttcatggagaatggctccctggactcctttctccggcaaaacgatgggcagttcacagtcatccagctggtgggcatgcttcggggcatcgcagctggcatgaagtacctggcagacatgaactatgttcaccgtgacctggctgcccgcaacatcctcgtcaacagcaacctggtctgcaaggtgtcggactttgggctctcacgctttctagaggacgatacctcagaccccacctacaccagtgccctgggcggaaagatccccatccgctggacagccccggaagccatccagtaccggaagttcacctcggccagtgatgtgtggagctacggcattgtcatgtgggaggtgatgtcctatggggagcggccctactgggacatgaccaaccaggatgtaatcaatgccattgagcaggactatcggctgccaccgcccatggactgcccgagcgccctgcaccaactcatgctggactgttggcagaaggaccgcaaccaccggcccaagttcggccaaattgtcaacacgctagacaagatgatccgcaatcccaacagcctcaaagccatggcgcccctctcctctggcatcaacctgccgctgctggaccgcacgatccccgactacaccagctttaacacggtggacgagtggctggaggccatcaagatggggcagtacaaggagagcttcgccaatgccggcttcacctcctttgacgtcgtgtctcagatgatgatggaggacattctccgggttggggtcactttggctggccaccagaaaaaaatcctgaacagtatccaggtgatgcgggcgcagatgaaccagattcagtctgtggaggtttgacattcacctgcctcggctcacctcttcctccaagccccgccccctctgccccacgtgccggccctcctggtgctctatccactgcagggccagccactcgccaggaggccacgggccacgggaagaaccaagcggtgccagccacgagacgtcaccaagaaaacatgcaactcaaacgacggaaaaaaaaagggaatgggaaaaaagaaaacagatcctgggagggggcgggaaatacaaggaatattttttaaagaggattctcataaggaaagcaatgactgttcttgcgggggataaaaaagggcttgggagattcatgcgatgtgtccaatcggagacaaaagcagtttctctccaactccctctgggaaggtgacctggccagagccaagaaacactttcagaaaaacaaatgtgaaggggagagacaggggccgcccttggctcctgtccctgctgctcctctaggcctcactcaacaaccaagcgcctggaggacgggacagatggacagacagccaccctgagaacccctctgggaaaatctattcctgccaccactgggcaaacagaagaatttttctgtctttggagagtattttagaaactccaatgaaagacactgtttctcctgttggctcacagggctgaaaggggcttttgtcctcctgggtcagggagaacgcggggaccccagaaaggtcagccttcctgaggatgggcaacccccaggtctgcagctccaggtacatatcacgcgcacagcctggcagcctggccctcctggtgcccactcccgccagcccctgcctcgaggactgatactgcagtgactgccgtcagctccgactgccgctgagaagggttgatcctgcatctgggtttgtttacagcaattcctggactcgggggtattttggtcacagggtggttttggtttagggggtttgtttgttgggttgttttttgttttttggttttttttaatgacaatgaagtgacactttgacatttcctaccttttgaggacttgatccttctccaggaagaaggtgctttctgcttactgacttaggcaatacaccaagggcgagattttatatgcacatttctggatttttttatacggttttcattgacactcttccctcctcccacctgccaccaggcctcaccaaagcccactgccatggggccatctgggccattcagagactggagtgagatttgggtgtggagggggaggcgccaaggtggaggagcttcccactccaggactgttgatgaaagggacagattgaggaggaagtgggctctgaggctgcagggctggaagtccttgcccacttcccactctcctgccccaatctatctagtacttcccaggcaaataggcccctttgaggctcctgagtgccctcagatggtcaaaacccagttttccctctgggagcctaaaccaggctgcatcggaggccaggacccggatcattcactgtgataccctgccctccagagggtgcgctcagagacacgggcaagcatgcctcttcccttccctggagagaaagtgtgtgatttctctcccacctccttccccccaccagacctttgctgggcctaaaggtcttggccatggggacgccctcagtctagggatctggccacagactccctcctgtgaaccaacacagacacccaagcagagcaatcagttagtgattggttccaagtctttgctattgtgaatagtgccgcaataaacatatgtgtgcatgtgtctttatagcagccagatttataatcctttgggtatatactcagtaatgggattgctgggtcaaatggcatttctagttctagatccctgaggaatcgccacaccgacttccacaatggttgaactagtttacagtcccaccaacagtgtaaaagtgttcctatttctccacatcctctccagcacctgttgtttcctgactttttaatgatcgccattctaactggtttgagatggtatctcactgtggttttgatttgcatttctctgatggccagtgatgatgagcattttttcatgtgttttttggctgcataaatggcttcttttgagaagtgtctgttcatatccttcgcccactttttgatggggttgtttgtttttttcttgtaaatttg

SEQ ID NO: 662 - DNA, 4387 bp, Homo sapiens
ccctggccccccgagcccggggcgcgcgctcccgcccgggccgtccgggccccgcggcgccgcggcccgaggccccgggaagcgcagccatggctctgcggaggctgggggccgcgctgctgctgctgccgctgctcgccgccgtggaagaaacgctaatggactccactacagcgactgctgagctgggctggatggtgcatcctccatcagggtgggaagaggtgagtggctacgatgagaacatgaacacgatccgcacgtaccaggtgtgcaacgtgtttgagtcaagccagaacaactggctacggaccaagtttatccggcgccgtggcgcccaccgcatccacgtggagatgaagttttcggtgcgtgactgcagcagcatccccagcgtgcctggctcctgcaaggagaccttcaacctctattactatgaggctgactttgactcggccaccaagaccttccccaactggatggagaatccatgggtgaaggtggataccattgcagccgacgagagcttctcccaggtggacctgggtggccgcgtcatgaaaatcaacaccgaggtgcggagcttcggacctgtgtcccgcagcggcttctacctggccttccaggactatggcggctgcatgtccctcatcgccgtgcgtgtcttctaccgcaagtgcccccgcatcatccagaatggcgccatcttccaggaaaccctgtcgggggctgagagcacatcgctggtggctgcccggggcagctgcatcgccaatgcggaagaggtggatgtacccatcaagctctactgtaacggggacggcgagtggctggtgcccatcgggcgctgcatgtgcaaagcaggcttcgaggccgttgagaatggcaccgtctgccgaggttgtccatctgggactttcaaggccaaccaaggggatgaggcctgtacccactgtcccatcaacagccggaccacttctgaaggggccaccaactgtgtctgccgcaatggctactacagagcagacctggaccccctggacatgccctgcacaaccatcccctccgcgccccaggctgtgatttccagtgtcaatgagacctccctcatgctggagtggacccctccccgcgactccggaggccgagaggacctcgtctacaacatcatctgcaagagctgtggctcgggccggggtgcctgcacccgctgcggggacaatgtacagtacgcaccacgccagctaggcctgaccgagccacgcatttacatcagtgacctgctggcccacacccagtacaccttcgagatccaggctgtgaacggcgttactgaccagagccccttctcgcctcagttcgcctctgtgaacatcaccaccaaccaggcagctccatcggcagtgtccatcatgcatcaggtgagccgcaccgtggacagcattaccctgtcgtggtcccagccggaccagcccaatggcgtgatcctggactatgagctgcagtactatgagaaggagctcagtgagtacaacgccacagccataaaaagccccaccaacacggtcaccgtgcagggcctcaaagccggcgccatctatgtcttccaggtgcgggcacgcaccgtggcaggctacgggcgctacagcggcaagatgtacttccagaccatgacagaagccgagtaccagacaagcatccaggagaagttgccactcatcatcggctcctcggccgctggcctggtcttcctcattgctgtggttgtcatcgccatcgtgtgtaacagaagacgggggtttgagcgtgctgactcggagtacacggacaagctgcaacactacaccagtggccacatgaccccaggcatgaagatctacatcgatcctttcacctacgaggaccccaacgaggcagtgcgggagtttgccaaggaaattgacatctcctgtgtcaaaattgagcaggtgatcggagcaggggagtttggcgaggtctgcagtggccacctgaagctgccaggcaagagagagatctttgtggccatcaagacgctcaagtcgggctacacggagaagcagcgccgggacttcctgagcgaagcctccatcatgggccagttcgaccatcccaacgtcatccacctggagggtgtcgtgaccaagagcacacctgtgatgatcatcaccgagttcatggagaatggctccctggactcctttctccggcaaaacgatgggcagttcacagtcatccagctggtgggcatgcttcggggcatcgcagctggcatgaagtacctggcagacatgaactatgttcaccgtgacctggctgcccgcaacatcctcgtcaacagcaacctggtctgcaaggtgtcggactttgggctctcacgctttctagaggacgatacctcagaccccacctacaccagtgccctgggcggaaagatccccatccgctggacagccccggaagccatccagtaccggaagttcacctcggccagtgatgtgtggagctacggcattgtcatgtgggaggtgatgtcctatggggagcggccctactgggacatgaccaaccaggatgtaatcaatgccattgagcaggactatcggctgccaccgcccatggactgcccgagcgccctgcaccaactcatgctggactgttggcagaaggaccgcaaccaccggcccaagttcggccaaattgtcaacacgctagacaagatgatccgcaatcccaacagcctcaaagccatggcgcccctctcctctggcatcaacctgccgctgctggaccgcacgatccccgactacaccagctttaacacggtggacgagtggctggaggccatcaagatggggcagtacaaggagagcttcgccaatgccggcttcacctcctttgacgtcgtgtctcagatgatgatggaggacattctccgggttggggtcactttggctggccaccagaaaaaaatcctgaacagtatccaggtgatgcgggcgcagatgaaccagattcagtctgtggagggccagccactcgccaggaggccacgggccacgggaagaaccaagcggtgccagccacgagacgtcaccaagaaaacatgcaactcaaacgacggaaaaaaaaagggaatgggaaaaaagaaaacagatcctgggagggggcgggaaatacaaggaatattttttaaagaggattctcataaggaaagcaatgactgttcttgcgggggataaaaaagggcttgggagattcatgcgatgtgtccaatcggagacaaaagcagtttctctccaactccctctgggaaggtgacctggccagagccaagaaacactttcagaaaaacaaatgtgaaggggagagacaggggccgcccttggctcctgtccctgctgctcctctaggcctcactcaacaaccaagcgcctggaggacgggacagatggacagacagccaccctgagaacccctctgggaaaatctattcctgccaccactgggcaaacagaagaatttttctgtctttggagagtattttagaaactccaatgaaagacactgtttctcctgttggctcacagggctgaaaggggcttttgtcctcctgggtcagggagaacgcggggaccccagaaaggtcagccttcctgaggatgggcaacccccaggtctgcagctccaggtacatatcacgcgcacagcctggcagcctggccctcctggtgcccactcccgccagcccctgcctcgaggactgatactgcagtgactgccgtcagctccgactgccgctgagaagggttgatcctgcatctgggtttgtttacagcaattcctggactcgggggtattttggtcacagggtggttttggtttagggggtttgtttgttgggttgttttttgttttttggttttttttaatgacaatgaagtgacactttgacatttcctaccttttgaggacttgatccttctccaggaagaaggtgctttctgcttactgacttaggcccctttgaggctcctgagtgccctcagatggtcaaaacccagttttccctctgggagcctaaaccaggctgcatcggaggccaggacccggatcattcactgtgataccctgccctccagagggtgcgctcagagacacgggcaagcatgcctcttcccttccctggagagaaagtgtgtgatttctctcccacctccttccccccaccagacctttgctgggcctaaaggtcttggccatggggacgccctcagtctagggatctggccacagactccctcctgtgaaccaacacagacacccaagcagagcaatcagttagtgaattgaatggaaataaacgctt

SEQ ID NO: 663 - DNA, 3935 bp, Homo sapiens
cctcgcgcaagcgggtcactgtggtggatgcaattcccctcgcctccagccgcgaggagctccccggcgccgcaggcagcgtcctcctccgaagcagctgcacctgcaactgggcagcctggaccctcgtgccctgttcccgggacctcgcgcagggggcgccccgggacaccccctgcgggccgggtggaggaggaagaggaggaggaggaagaagacgtggacaaggacccccatcctacccagaacacctgcctgcgctgccgccacttctctttaagggagaggaaaagagagcctaggagaaccatggggggctgcgaagtccgggaatttcttttgcaatttggtttcttcttgcctctgctgacagcgtggccaggcgactgcagtcacgtctccaacaaccaagttgtgttgcttgatacaacaactgtactgggagagctaggatggaaaacatatccattaaatgggtgggatgccatcactgaaatggatgaacataataggcccattcacacataccaggtatgtaatgtaatggaaccaaaccaaaacaactggcttcgtacaaactggatctcccgtgatgcagctcagaaaatttatgtggaaatgaaattcacactaagggattgtaacagcatcccatgggtcttggggacttgcaaagaaacatttaatctgttttatatggaatcagatgagtcccacggaattaaattcaagccaaaccagtatacaaagatcgacacaattgctgctgatgagagttttacccagatggatttgggtgatcgcatcctcaaactcaacactgaaattcgtgaggtggggcctatagaaaggaaaggattttatctggcttttcaagacattggggcgtgcattgccctggtttcagtccgtgttttctacaagaaatgccccttcactgttcgtaacttggccatgtttcctgataccattccaagggttgattcctcctctttggttgaagtacggggttcttgtgtgaagagtgctgaagagcgtgacactcctaaactgtattgtggagctgatggagattggctggttcctcttggaaggtgcatctgcagtacaggatatgaagaaattgagggttcttgccatgcttgcagaccaggattctataaagcttttgctgggaacacaaaatgttctaaatgtcctccacacagtttaacatacatggaagcaacttctgtctgtcagtgtgaaaagggttatttccgagctgaaaaagacccaccttctatggcatgtaccaggccaccttcagctcctaggaatgtggtttttaacatcaatgaaacagcccttattttggaatggagcccaccaagtgacacaggagggagaaaagatctcacatacagtgtaatctgtaagaaatgtggcttagacaccagccagtgtgaggactgtggtggaggactccgcttcatcccaagacatacaggcctgatcaacaattccgtgatagtacttgactttgtgtctcacgtgaattacacctttgaaatagaagcaatgaatggagtttctgagttgagtttttctcccaagccattcacagctattacagtgaccacggatcaagatgcaccttccctgataggtgtggtaaggaaggactgggcatcccaaaatagcattgccctatcatggcaagcacctgctttttccaatggagccattctggactacgagatcaagtactatgagaaagaacatgagcagctgacctactcttccacaaggtccaaagcccccagtgtcatcatcacaggtcttaagccagccaccaaatatgtatttcacatccgagtgagaactgcgacaggatacagtggctacagtcagaaatttgaatttgaaacaggagatgaaacttctgacatggcagcagaacaaggacagattctcgtgatagccaccgccgctgttggcggattcactctcctcgtcatcctcactttattcttcttgatcactgggagatgtcagtggtacataaaagccaagatgaagtcagaagagaagagaagaaaccacttacagaatgggcatttgcgcttcccgggaattaaaacttacattgatccagatacatatgaagacccatccctagcagtccatgaatttgcaaaggagattgatccctcaagaattcgtattgagagagtcattggggcaggtgaatttggagaagtctgtagtgggcgtttgaagacaccagggaaaagagagatcccagttgccattaaaactttgaaaggtggccacatggatcggcaaagaagagattttctaagagaagctagtatcatgggccagtttgaccatccaaacatcattcgcctagaaggggttgtcaccaaaagatccttcccggccattggggtggaggcgttttgccccagcttcctgagggcagggtttttaaatagcatccaggccccgcatccagtgccagggggaggatctttgccccccaggattcctgctggcagaccagtaatgattgtggtggaatatatggagaatggatccctagactcctttttgcggaagcatgatggccacttcacagtcatccagttggtcggaatgctccgaggcattgcatcaggcatgaagtatctttctgatatgggttatgttcatcgagacctagcggctcggaatatactggtcaatagcaacttagtatgcaaagtttctgattttggtctctccagagtgctggaagatgatccagaagctgcttatacaacaactggtggaaaaatccccataaggtggacagccccagaagccatcgcctacagaaaattctcctcagcaagcgatgcatggagctatggcattgtcatgtgggaggtcatgtcctatggagagagaccttattgggaaatgtctaaccaagatgtcattctgtccattgaagaagggtacagacttccagctcccatgggctgtccagcatctctacaccagctgatgctccactgctggcagaaggagagaaatcacagaccaaaatttactgacattgtcagcttccttgacaaactgatccgaaatcccagtgcccttcacaccctggtggaggacatccttgtaatgccagagtcccctggtgaagttccggaatatcctttgtttgtcacagttggtgactggctagattctataaagatggggcaatacaagaataacttcgtggcagcagggtttacaacatttgacctgatttcaagaatgagcattgatgacattagaagaattggagtcatacttattggacaccagagacgaatagtcagcagcatacagactttacgtttacacatgatgcacatacaggagaagggatttcatgtatgaaagtaccacaagcacctgtgttttgtgcctcagcatttctaaaatgaacgatatcctctctactactctctcttctgattctccaaacatcacttcacaaactgcagtcttctgttcagactataggcacacaccttatgtttatgcttccaaccaggattttaaaatcatgctacataaatccgttctgaataacctgcaactaaaaccctggcccactgcagattattgctacgcaatgcaacagctttaaaacctatctcagcccatgaatggaaaacaaatccaaatccgatccttgaaaagcaaaggctctaaagaagctcttcagaagagacggtaaagaatgaattcttttacttatcacccaaccacatttcttaaaaatgtgttttggtgtcttttcctaccaaatttctgctctacaaggcagtcagttaaatctctcatttcataattttcactgtgctagttctttcttttctcctcttttaataaattttctaaaactttct

SEQ ID NO: 664 - DNA, 3809 bp, Homo sapiens
cctcgcgcaagcgggtcactgtggtggatgcaattcccctcgcctccagccgcgaggagctccccggcgccgcaggcagcgtcctcctccgaagcagctgcacctgcaactgggcagcctggaccctcgtgccctgttcccgggacctcgcgcagggggcgccccgggacaccccctgcgggccgggtggaggaggaagaggaggaggaggaagaagacgtggacaaggacccccatcctacccagaacacctgcctgcgctgccgccacttctctttaagggagaggaaaagagagcctaggagaaccatggggggctgcgaagtccgggaatttcttttgcaatttggtttcttcttgcctctgctgacagcgtggccaggcgactgcagtcacgtctccaacaaccaagttgtgttgcttgatacaacaactgtactgggagagctaggatggaaaacatatccattaaatgggtgggatgccatcactgaaatggatgaacataataggcccattcacacataccaggtatgtaatgtaatggaaccaaaccaaaacaactggcttcgtacaaactggatctcccgtgatgcagctcagaaaatttatgtggaaatgaaattcacactaagggattgtaacagcatcccatgggtcttggggacttgcaaagaaacatttaatctgttttatatggaatcagatgagtcccacggaattaaattcaagccaaaccagtatacaaagatcgacacaattgctgctgatgagagttttacccagatggatttgggtgatcgcatcctcaaactcaacactgaaattcgtgaggtggggcctatagaaaggaaaggattttatctggcttttcaagacattggggcgtgcattgccctggtttcagtccgtgttttctacaagaaatgccccttcactgttcgtaacttggccatgtttcctgataccattccaagggttgattcctcctctttggttgaagtacggggttcttgtgtgaagagtgctgaagagcgtgacactcctaaactgtattgtggagctgatggagattggctggttcctcttggaaggtgcatctgcagtacaggatatgaagaaattgagggttcttgccatgcttgcagaccaggattctataaagcttttgctgggaacacaaaatgttctaaatgtcctccacacagtttaacatacatggaagcaacttctgtctgtcagtgtgaaaagggttatttccgagctgaaaaagacccaccttctatggcatgtaccaggccaccttcagctcctaggaatgtggtttttaacatcaatgaaacagcccttattttggaatggagcccaccaagtgacacaggagggagaaaagatctcacatacagtgtaatctgtaagaaatgtggcttagacaccagccagtgtgaggactgtggtggaggactccgcttcatcccaagacatacaggcctgatcaacaattccgtgatagtacttgactttgtgtctcacgtgaattacacctttgaaatagaagcaatgaatggagtttctgagttgagtttttctcccaagccattcacagctattacagtgaccacggatcaagatgcaccttccctgataggtgtggtaaggaaggactgggcatcccaaaatagcattgccctatcatggcaagcacctgctttttccaatggagccattctggactacgagatcaagtactatgagaaagaacatgagcagctgacctactcttccacaaggtccaaagcccccagtgtcatcatcacaggtcttaagccagccaccaaatatgtatttcacatccgagtgagaactgcgacaggatacagtggctacagtcagaaatttgaatttgaaacaggagatgaaacttctgacatggcagcagaacaaggacagattctcgtgatagccaccgccgctgttggcggattcactctcctcgtcatcctcactttattcttcttgatcactgggagatgtcagtggtacataaaagccaagatgaagtcagaagagaagagaagaaaccacttacagaatgggcatttgcgcttcccgggaattaaaacttacattgatccagatacatatgaagacccatccctagcagtccatgaatttgcaaaggagattgatccctcaagaattcgtattgagagagtcattggggcaggtgaatttggagaagtctgtagtgggcgtttgaagacaccagggaaaagagagatcccagttgccattaaaactttgaaaggtggccacatggatcggcaaagaagagattttctaagagaagctagtatcatgggccagtttgaccatccaaacatcattcgcctagaaggggttgtcaccaaaagcagaccagtaatgattgtggtggaatatatggagaatggatccctagactcctttttgcggaagcatgatggccacttcacagtcatccagttggtcggaatgctccgaggcattgcatcaggcatgaagtatctttctgatatgggttatgttcatcgagacctagcggctcggaatatactggtcaatagcaacttagtatgcaaagtttctgattttggtctctccagagtgctggaagatgatccagaagctgcttatacaacaactggtggaaaaatccccataaggtggacagccccagaagccatcgcctacagaaaattctcctcagcaagcgatgcatggagctatggcattgtcatgtgggaggtcatgtcctatggagagagaccttattgggaaatgtctaaccaagatgtcattctgtccattgaagaagggtacagacttccagctcccatgggctgtccagcatctctacaccagctgatgctccactgctggcagaaggagagaaatcacagaccaaaatttactgacattgtcagcttccttgacaaactgatccgaaatcccagtgcccttcacaccctggtggaggacatccttgtaatgccagagtcccctggtgaagttccggaatatcctttgtttgtcacagttggtgactggctagattctataaagatggggcaatacaagaataacttcgtggcagcagggtttacaacatttgacctgatttcaagaatgagcattgatgacattagaagaattggagtcatacttattggacaccagagacgaatagtcagcagcatacagactttacgtttacacatgatgcacatacaggagaagggatttcatgtatgaaagtaccacaagcacctgtgttttgtgcctcagcatttctaaaatgaacgatatcctctctactactctctcttctgattctccaaacatcacttcacaaactgcagtcttctgttcagactataggcacacaccttatgtttatgcttccaaccaggattttaaaatcatgctacataaatccgttctgaataacctgcaactaaaaccctggcccactgcagattattgctacgcaatgcaacagctttaaaacctatctcagcccatgaatggaaaacaaatccaaatccgatccttgaaaagcaaaggctctaaagaagctcttcagaagagacggtaaagaatgaattcttttacttatcacccaaccacatttcttaaaaatgtgttttggtgtcttttcctaccaaatttctgctctacaaggcagtcagttaaatctctcatttcataattttcactgtgctagttctttcttttctcctcttttaataaattttctaaaactttct

SEQ ID NO: 665 - DNA, 6936 bp, Homo sapiens
actgggagagaacttctctcccagggcggtgcgacccggagctccagcgcccgagtctccacttcgtttgctgaaacttgctttctaccagctaagaaccatgctgcgagtgattgtggaatctgccagcaatatccctaaaacgaaatttggcaagccggatcctattgtttctgtcatttttaagggttccatgagccagatccgaattgaggctggagtgagtgcctgtgagccaggggtggccattctgccctaagttccatgcggacagccaggctgtgaagctgaatctagctgagattagactacacagacctctgagaccaatttcaactctgagacttgatgattcttccaaacagtcctccaaacagaacagatgagaaaaagaaaacaaagaaagttgataatgaattgaaccctgtctggaatgagattttggagtttgacttgaggggtataccactggacttttcatcttcccttgggattattgtgaaagattttgagacaattggacaaaataaattaattggcacggcgactgtagccctgaaggacctgactggtgaccagagcagatccctgccgtacaagctgatctccctgctaaatgaaaaagggcaagatactggggccaccattgacttggtgatcggctatgatccgccttctgctccacatccaaatgacctgagcgggcccagcgtgccaggcatgggaggagatggggaagaagatgaaggtgatgaagacaggttggacaatgcagtcaggggccctgggcccaaggggccagttgggacggtgtcggaagctcagcttgctcggaggctcaccaaagtaaagaacagccggcggatgctgtcaaataagccacaggacttccagatccgcgtccgagtgattgagggccgacagttaagtggtaacaacataaggcctgtggtcaaagttcacgtctgtggccagacacaccgaacaagaatcaagagaggaaacaaccctttttttgatgagttgtttttctacaatgtcaacatgaccccttctgaattgatggatgagatcatcagcatccgggtttataattctcactctctgcgggcagattgtctgatgggggaatttaagattgatgttggatttgtttatgatgaacctggccatgctgtcatgagaaagtggcttcttctcaatgacccggaagataccagttcaggttctaaaggttatatgaaagtcagcatgtttgtcctgggaaccggagatgagcctcctcctgagagacgagatcgtgataatgacagtgatgatgtggagagtaatttgttactccctgctggcattgccctccggtgggtgaccttcttgctgaaaatctaccgagctgaggacatcccccagatggatgatgccttctcacagacagtaaaggaaatatttggaggcaatgcagataagaaaaatctcgtggatccttttgtagaagtttcctttgctggaaaaaaggtttgtacaaacataattgagaaaaatgcaaacccagagtggaatcaggtcgtcaatcttcagatcaagtttccttcagtgtgtgaaaaaataaaactaacaatatatgactgggaccgtcttactaaaaatgatgtagttggaacaacatatctacacctctctaaaattgctgcctctggtggggaagtggaagtaaacacaggagaaacagaggtaggctttgttccaacgtttggaccttgttacctgaatctttatggaagccccagagagtacacgggattcccagacccctatgatgagctgaatactggaaagggggaaggagttgcctacagaggcaggatcttggttgaattagccacttttcttgagaagacaccaccagataaaaagcttgagcccatttcaaatgatgacctgctggttgttgagaaataccagcgaaggcggaagtacagcctgtctgccgtgtttcattcagccaccatgttgcaagatgttggtgaggccattcagtttgaagtcagcattgggaactatggcaacaagtttgacaccacctgtaagcctttggcatcaacaactcagtacagccgtgctgtatttgatggcaactactattattacttgccttgggcccacaccaagccagttgttaccctgacttcatactgggaggatattagtcatcgcctggatgcggtgaacactctcctagctatggcagaacggctgcaaacaaatatagaagctctaaaatcagggatacaaggtaaaattcctgcaaaccagctggctgaattgtggctgaagctgatagatgaagttatagaagacacgagatacacgttgcctctcacagaaggaaaagccaacgtcacagttctcgatactcagatccgaaagctgcggtccaggtctctctcccaaatacatgaggcggctgtgaggatgaggtcggaagccacagatgtgaagtccacactggcagaaattgaggactggcttgataaattaatgcagctgactgaagagccacagaacagcatgcctgacatcatcatctggatgatccggggagagaagagactggcctatgcacgaattcccgcacatcaggtcttgtactccaccagtggtgagaatgcatctggaaaatactgtgggaaaacccaaaccatctttctgaagtatccacaggagaaaaacaacgggccaaaggtgcctgtggagttgcgagtgaacatctggctaggcttaagtgctgtggagaagaagtttaacagcttcgcagaaggaactttcaccgtctttgctgaaatgtatgaaaatcaagctctcatgtttggaaaatggggtacttctggattagtaggacgtcataagttttctgatgtcacaggaaaaataaaactcaagagggaattttttctgcctccaaaaggctgggaatgggaaggagagtggatagttgatcctgaaagaagcttgctgactgaggcagatgcaggtcacacggagttcactgatgaagtctatcagaacgagagccgctaccccgggggcgactggaagccggccgaggacacctacacggatgcgaacggcgataaagcagcatcacccagcgagttgacttgtcctccaggttgggaatgggaagatgatgcatggtcttatgacataaatcgagcggtggatgagaaaggctgggaatatggaatcaccattcctcctgatcataagcccaaatcctgggttgcagcagagaaaatgtaccacactcatagacggcgaaggctggtccgaaaacgcaagaaagatttaacacagactgcttcaagcaccgcaagggccatggaggaattgcaagaccaagagggctgggaatatgcttctctaattggctggaaatttcactggaaacaacgtagttcagataccttccgccgcagacgctggaggagaaaaatggctccttcagaaacacatggtgcagctgccatctttaaacttgaaggtgcccttggggcagacactaccgaagatggggatgagaagagcctggagaaacagaagcacagtgccaccactgtgttcggagcaaacacccccattgtttcctgcaattttgacagagtctacatctaccatctgcgctgctatgtctatcaagccagaaacctcttggctttagataaggatagcttttcagatccatatgctcatatctgtttcctccatcggagcaaaaccactgagatcatccattcaaccctgaatcccacgtgggaccaaacaattatattcgatgaagttgaaatctatggggaaccccaaacagttctacagaatccacccaaagttatcatggaactttttgacaatgaccaagtgggcaaagatgaatttttaggacgaagcattttctctcctgtggtgaaactgaactcagaaatggacatcacacccaaacttctctggcacccagtaatgaatggagacaaagcctgcggggatgttcttgtaactgcagagctgattctgaggggcaaggatggctccaaccttcccattcttccccctcaaagggcgccaaatctatacatggtcccccaggggatcaggcctgtggtccagctcactgccattgagattctagcttggggcttaagaaatatgaaaaacttccagatggcttctatcacatcccccagtcttgttgtggagtgtggaggagaaagggtggaatcggtggtgatcaaaaaccttaagaagacacccaactttccaagttctgttctcttcatgaaagtgttcttgcccaaggaggaattgtacatgcccccactggtgatcaaggtcatcgaccacaggcagtttgggcggaagcctgtcgtcggccagtgcaccatcgagcgcctggaccgctttcgctgtgacccttatgcagggaaagaggacatcgtcccacagctcaaagcctcccttctgtctgccccaccatgccgggacatcgttatcgaaatggaagacaccaaaccattactggcttctaagtgcttaagcagtatgtcaacagcactcagcaaaatggcttctccagcgacagtgcatctgacagaaaaggaggaagaaatcgtggactggtggagtaaattttatgcttcctcaggggaacatgaaaaatgcggacagtatattcagaaaggctattccaagctcaagatatataattgtgaactagaaaatgtagcagaatttgagggcctgacagacttctcagatacgttcaagttgtaccgaggcaagtcggatgaaaatgaagatccttctgtggttggagagtttaagggctcctttcggatctaccctctgccggatgaccccagcgtgccagcccctcccagacagtttcgggaattacctgacagcgtcccacaggaatgcacggttaggatttacattgttcgaggcttagagctccagccccaggacaacaatggcctgtgtgacccttacataaaaataacactgggcaaaaaagtcattgaagaccgagatcactacattcccaacactctcaacccagtctttggcaggatgtacgaactgagctgctacttacctcaagaaaaagacctgaaaatttctgtctatgattatgacacctttacccgggatgaaaaagtaggagaaacaattattgatctggaaaaccgattcctttcccgctttgggtcccactgcggcataccagaggagtactgtgtttctggagtcaatacctggcgagatcaactgagaccaacacagctgcttcaaaatgtcgccagattcaaaggcttcccacaacccatcctttccgaagatgggagtagaatcagatatggaggacgagactacagcttggatgaatttgaagccaacaaaatcctgcaccagcacctcggggcccctgaagagcggcttgctcttcacatcctcaggactcaggggctggtccctgagcacgtggaaacaaggactttgcacagcaccttccagcccaacattatactacctgcgtgtgatcatctggaacaccaaggacgttatcttggacgagaaaagcatcacaggagaggaaatgagtgacatctacgtcaaaggctggattcctggcaatgaagaaaacaaacagaaaacagatgtccattacagatctttggatggtgaagggaattttaactggcgatttgttttcccgtttgactaccttccagccgaacaactctgtatcgttgcgaaaaaagagcatttctggagtattgaccaaacggaatttcgaatcccacccaggctgatcattcagatatgggacaatgacaagttttctctggatgactacttgggtttcctagaacttgacttgcgtcacacgatcattcctgcaaaatcaccagagaaatgcaggttggacatgattccggacctcaaagccatgaacccccttaaagccaagacagcctccctctttgagcagaagtccatgaaaggatggtggccatgctacgcagagaaagatggcgcccgcgtaatggctgggaaagtggagatgacattggaaatcctcaacgagaaggaggccgacgagaggccagccgggaaggggcgggacgaacccaacatgaaccccaagctggacttaccaaatcgaccagaaacctccttcctctggttcaccaacccatgcaagaccatgaagttcatcgtgtggcgccgctttaagtgggtcatcatcggcttgctgttcctgcttatcctgctgctcttcgtggccgtgctcctctactctttgccgaactatttgtcaatgaagattgtaaagccaaatgtgtaacaaaggcaaaggcttcatttcaagagtcatccagcaatgagagaatcctgcctctgtagaccaacatccagtgtgattttgtgtctgagaccacaccccagtagcaggttacgccatgtcaccgagccccattgattcccagagggtcttagtcctggaaagtcaggccaacaagcaacgtttgcatcatgttatctcttaagtattaaaagttttattttctaaagtttaaatcatgtttttcaaaatatttttcaaggtggctggttccatttaaaaatcatctttttatatgtgtcttcggttctagacttcagcttttggaaattgctaaatagaattcaaaaatctctgcatcctgaggtgatatacttcatatttgtaatcaactgaaagagctgtgcattataaaatcagttagaatagttagaacaattcttatttatgcccacaaccattgctatattttgtatggatgtcataaaagtctatttaacctctgtaatgaaactaaataaaaatgtttcaccttt

SEQ ID NO: 666 - DNA, 6818 bp, Homo sapiens
atcctcccttcactgggagagaacttctctcccagggcggtgcgacccggagctccagcgcccgagtctccacttcgtttgctgaaacttgctttctaccagctaagaaccatgctgcgagtgattgtggaatctgccagcaatatccctaaaacgaaatttggcaagccggatcctattgtttctgtcatttttaaggatgagaaaaagaaaacaaagaaagttgataatgaattgaaccctgtctggaatgagattttggagtttgacttgaggggtataccactggacttttcatcttcccttgggattattgtgaaagattttgagacaattggacaaaataaattaattggcacggcgactgtagccctgaaggacctgactggtgaccagagcagatccctgccgtacaagctgatctccctgctaaatgaaaaagggcaagatactggggccaccattgacttggtgatcggctatgatccgccttctgctccacatccaaatgacctgagcgggcccagcgtgccaggcatgggaggagatggggaagaagatgaaggtgatgaagacaggttggacaatgcagtcaggggccctgggcccaaggggccagttgggacggtgtcggaagctcagcttgctcggaggctcaccaaagtaaagaacagccggcggatgctgtcaaataagccacaggacttccagatccgcgtccgagtgattgagggccgacagttaagtggtaacaacataaggcctgtggtcaaagttcacgtctgtggccagacacaccgaacaagaatcaagagaggaaacaaccctttttttgatgagttgtttttctacaatgtcaacatgaccccttctgaattgatggatgagatcatcagcatccgggtttataattctcactctctgcgggcagattgtctgatgggggaatttaagattgatgttggatttgtttatgatgaacctggccatgctgtcatgagaaagtggcttcttctcaatgacccggaagataccagttcaggttctaaaggttatatgaaagtcagcatgtttgtcctgggaaccggagatgagcctcctcctgagagacgagatcgtgataatgacagtgatgatgtggagagtaatttgttactccctgctggcattgccctccggtgggtgaccttcttgctgaaaatctaccgagctgaggacatcccccagatggatgatgccttctcacagacagtaaaggaaatatttggaggcaatgcagataagaaaaatctcgtggatccttttgtagaagtttcctttgctggaaaaaaggtttgtacaaacataattgagaaaaatgcaaacccagagtggaatcaggtcgtcaatcttcagatcaagtttccttcagtgtgtgaaaaaataaaactaacaatatatgactgggaccgtcttactaaaaatgatgtagttggaacaacatatctacacctctctaaaattgctgcctctggtggggaagtggaagatttctcatcttcgggaactggggctgcatcatatacagtaaacacaggagaaacagaggtaggctttgttccaacgtttggaccttgttacctgaatctttatggaagccccagagagtacacgggattcccagacccctatgatgagctgaatactggaaagggggaaggagttgcctacagaggcaggatcttggttgaattagccacttttcttgagaagacaccaccagataaaaagcttgagcccatttcaaatgatgacctgctggttgttgagaaataccagcgaaggcggaagtacagcctgtctgccgtgtttcattcagccaccatgttgcaagatgttggtgaggccattcagtttgaagtcagcattgggaactatggcaacaagtttgacaccacctgtaagcctttggcatcaacaactcagtacagccgtgctgtatttgatggcaactactattattacttgccttgggcccacaccaagccagttgttaccctgacttcatactgggaggatattagtcatcgcctggatgcggtgaacactctcctagctatggcagaacggctgcaaacaaatatagaagctctaaaatcagggatacaaggtaaaattcctgcaaaccagctggctgaattgtggctgaagctgatagatgaagttatagaagacacgagatacacgttgcctctcacagaaggaaaagccaacgtcacagttctcgatactcagatccgaaagctgcggtccaggtctctctcccaaatacatgaggcggctgtgaggatgaggtcggaagccacagatgtgaagtccacactggcagaaattgaggactggcttgataaattaatgcagctgactgaagagccacagaacagcatgcctgacatcatcatctggatgatccggggagagaagagactggcctatgcacgaattcccgcacatcaggtcttgtactccaccagtggtgagaatgcatctggaaaatactgtgggaaaacccaaaccatctttctgaagtatccacaggagaaaaacaacgggccaaaggtgcctgtggagttgcgagtgaacatctggctaggcttaagtgctgtggagaagaagtttaacagcttcgcagaaggaactttcaccgtctttgctgaaatgtatgaaaatcaagctctcatgtttggaaaatggggtacttctggattagtaggacgtcataagttttctgatgtcacaggaaaaataaaactcaagagggaattttttctgcctccaaaaggctgggaatgggaaggagagtggatagttgatcctgaaagaagcttgctgactgaggcagatgcaggtcacacggagttcactgatgaagtctatcagaacgagagccgctaccccgggggcgactggaagccggccgaggacacctacacggatgcgaacggcgataaagcagcatcacccagcgagttgacttgtcctccaggttgggaatgggaagatgatgcatggtcttatgacataaatcgagcggtggatgagaaaggctgggaatatggaatcaccattcctcctgatcataagcccaaatcctgggttgcagcagagaaaatgtaccacactcatagacggcgaaggctggtccgaaaacgcaagaaagatttaacacagactgcttcaagcaccgcaagggccatggaggaattgcaagaccaagagggctgggaatatgcttctctaattggctggaaatttcactggaaacaacgtagttcagataccttccgccgcagacgctggaggagaaaaatggctccttcagaaacacatggtgcagctgccatctttaaacttgaaggtgcccttggggcagacactaccgaagatggggatgagaagagcctggagaaacagaagcacagtgccaccactgtgttcggagcaaacacccccattgtttcctgcaattttgacagagtctacatctaccatctgcgctgctatgtctatcaagccagaaacctcttggctttagataaggatagcttttcagatccatatgctcatatctgtttcctccatcggagcaaaaccactgagatcatccattcaaccctgaatcccacgtgggaccaaacaattatattcgatgaagttgaaatctatggggaaccccaaacagttctacagaatccacccaaagttatcatggaactttttgacaatgaccaagtgggcaaagatgaatttttaggacgaagcattttctctcctgtggtgaaactgaactcagaaatggacatcacacccaaacttctctggcacccagtaatgaatggagacaaagcctgcggggatgttcttgtaactgcagagctgattctgaggggcaaggatggctccaaccttcccattcttccccctcaaagggcgccaaatctatacatggtcccccaggggatcaggcctgtggtccagctcactgccattgagattctagcttggggcttaagaaatatgaaaaacttccagatggcttctatcacatcccccagtcttgttgtggagtgtggaggagaaagggtggaatcggtggtgatcaaaaaccttaagaagacacccaactttccaagttctgttctcttcatgaaagtgttcttgcccaaggaggaattgtacatgcccccactggtgatcaaggtcatcgaccacaggcagtttgggcggaagcctgtcgtcggccagtgcaccatcgagcgcctggaccgctttcgctgtgacccttatgcagggaaagaggacatcgtcccacagctcaaagcctcccttctgtctgccccaccatgccgggacatcgttatcgaaatggaagacaccaaaccattactggcttctaaggaggaagaaatcgtggactggtggagtaaattttatgcttcctcaggggaacatgaaaaatgcggacagtatattcagaaaggctattccaagctcaagatatataattgtgaactagaaaatgtagcagaatttgagggcctgacagacttctcagatacgttcaagttgtaccgaggcaagtcggatgaaaatgaagatccttctgtggttggagagtttaagggctcctttcggatctaccctctgccggatgaccccagcgtgccagcccctcccagacagtttcgggaattacctgacagcgtcccacaggaatgcacggttaggatttacattgttcgaggcttagagctccagccccaggacaacaatggcctgtgtgacccttacataaaaataacactgggcaaaaaagtcattgaagaccgagatcactacattcccaacactctcaacccagtctttggcaggatgtacgaactgagctgctacttacctcaagaaaaagacctgaaaatttctgtctatgattatgacacctttacccgggatgaaaaagtaggagaaacaattattgatctggaaaaccgattcctttcccgctttgggtcccactgcggcataccagaggagtactgtgtttctggagtcaatacctggcgagatcaactgagaccaacacagctgcttcaaaatgtcgccagattcaaaggcttcccacaacccatcctttccgaagatgggagtagaatcagatatggaggacgagactacagcttggatgaatttgaagccaacaaaatcctgcaccagcacctcggggcccctgaagagcggcttgctcttcacatcctcaggactcaggggctggtccctgagcacgtggaaacaaggactttgcacagcaccttccagcccaacatttcccagggaaaacttcagatgtgggtggatgttttccccaagagtttggggccaccaggccctcctttcaacatcacaccccggaaagccaagaaatactacctgcgtgtgatcatctggaacaccaaggacgttatcttggacgagaaaagcatcacaggagaggaaatgagtgacatctacgtcaaaggctggattcctggcaatgaagaaaacaaacagaaaacagatgtccattacagatctttggatggtgaagggaattttaactggcgatttgttttcccgtttgactaccttccagccgaacaactctgtatcgttgcgaaaaaagagcatttctggagtattgaccaaacggaatttcgaatcccacccaggctgatcattcagatatgggacaatgacaagttttctctggatgactacttgggtttcctagaacttgacttgcgtcacacgatcattcctgcaaaatcaccagagaaatgcaggttggacatgattccggacctcaaagccatgaacccccttaaagccaagacagcctccctctttgagcagaagtccatgaaaggatggtggccatgctacgcagagaaagatggcgcccgcgtaatggctgggaaagtggagatgacattggaaatcctcaacgagaaggaggccgacgagaggccagccgggaaggggcgggacgaacccaacatgaaccccaagctggacttaccaaatcgaccagaaacctccttcctctggttcaccaacccatgcaagaccatgaagttcatcgtgtggcgccgctttaagtgggtcatcatcggcttgctgttcctgcttatcctgctgctcttcgtggccgtgctcctctactctttgccgaactatttgtcaatgaagattgtaaagccaaatgtgtaacaaaggcaaaggcttcatttcaagagtcatccagcaatgagagaatcctgcctctgtagaccaacatccagtgtgattttgtgtctgagaccacaccccagtagcaggttacgccatgtcaccgagccccattgattcccagagggtcttagtcctggaaagtcaggccaacaagcaacgtttgcatcatgttatctcttaagtattaaaagttttattttctaaagtttaaatcatgtttttcaaaatatttttcaaggtggctggttccatttaaaaatcatctttttatatgtgtcttcggttctagacttcagcttttggaaattgctaaatagaattcaaaaatctctgcatcctgaggtgatatacttcatatttgtaatcaactgaaagagctgtgcattataaaatcagttagaatagttagaacaattcttatttatgcccacaaccattgctatattttgtatggatgtcataaaagtctatttaacctctgtaatgaaactaaataaaaatgtttcaccttt

SEQ ID NO: 667 - DNA, 3858 bp, Homo sapiens
gagaagaaagccagtgcgtctctgggcgcaggggccagtggggctcggaggcacaggcaccccgcgacactccaggttccccgacccacgtccctggcagccccgattatttacagcctcagcagagcacggggcgggggcagaggggcccgcccgggagggctgctacttcttaaaacctctgcgggctgcttagtcacagccccccttgcttgggtgtgtccttcgctcgctccctccctccgtcttaggtcactgttttcaacctcgaataaaaactgcagccaacttccgaggcagcctcattgcccagcggaccccagcctctgccaggttcggtccgccatcctcgtcccgtcctccgccggcccctgccccgcgcccagggatcctccagctcctttcgcccgcgccctccgttcgctccggacaccatggacaagttttggtggcacgcagcctggggactctgcctcgtgccgctgagcctggcgcagatcgatttgaatataacctgccgctttgcaggtgtattccacgtggagaaaaatggtcgctacagcatctctcggacggaggccgctgacctctgcaaggctttcaatagcaccttgcccacaatggcccagatggagaaagctctgagcatcggatttgagacctgcagtttgcattgcagtcaacagtcgaagaaggtgtgggcagaagaaaaagctagtgatcaacagtggcaatggagctgtggaggacagaaagccaagtggactcaacggagaggccagcaagtctcaggaaatggtgcatttggtgaacaaggagtcgtcagaaactccagaccagtttatgacagctgatgagacaaggaacctgcagaatgtggacatgaagattggggtgtaacacctacaccattatcttggaaagaaacaaccgttggaaacataaccattacagggagctgggacacttaacagatgcaatgtgctactgattgtttcattgcgaatcttttttagcataaaattttctactctttttgttttttgtgttttgttctttaaagtcaggtccaatttgtaaaaacagcattgctttctgaaattagggcccaattaataatcagcaagaatttgatcgttccagttcccacttggaggcctttcatccctcgggtgtgctatggatggcttctaagacatttcccagggttaatagggcctggtccctgggaggaaatttgaatgggtccattttgcccttccatagcctaatccctgggcattgctttccactgaggttgggggttggggtgtactagttacacatcttcaacagaccccctctagaaatttttcagatgcttctgggagacacccaaagggtgaagctatttatctgtagtaaactatttatctgtgtttttgaaatattaaaccctggatcagtcctttgatcagtataattttttaaagttactttgtcagaggcacaaaagggtttaaactgattcataataaatatctgtacttcttcgatcttcaccttttgtgctgtgattcttcagtttctaaaccagcactgtctgggtccctacaatgtatcaggaagagctgagaatggtaaggagactcttctaagtcttcatctcagagaccctgagttcccactcagacccactcagccaaatctcatggaagaccaaggagggcagcactgtttttgttttttgttttttacactgtccaaaggttttccatcctgtcctggaatcagagttggaagctgaggagcttcagcctcttttatggtttaatggccacctgttctctcctgtgaaaggctttgcaaagtcacattaagtttgcatgacctgttatccctggggccctatttcatagaggctggccctattagtgatttccaaaaacaatatggaagtgccttttgatgtcttacaataagagaagaagccaatggaaatgaaagagattggcaaaggggaaggatgatgccatgtagatcctgtttgacatttttatggctgtatttgtaaacttaaacacaccagtgtctgttcttgatgcagttgctatttaggatgagttaagtgcctggggagtccctcaaaaggttaaagggattcccatcattggaatcttatcaccagataggcaagtttatgaccaaacaagagagtactggctttatcctctaacctcatattttctcccacttggcaagtcctttgtggcatttattcatcagtcagggtgtccgattggtcctagaacttccaaaggctgcttgtcatagaagccattgcatctataaagcaacggctcctgttaaatggtatctcctttctgaggctcctactaaaagtcatttgttacctaaacttatgtgcttaacaggcaatgcttctcagaccacaaagcagaaagaagaagaaaagctcctgactaaatcagggctgggcttagacagagttgatctgtagaatatctttaaaggagagatgtcaactttctgcactattcccagcctctgctcctccctgtctaccctctcccctccctctctccctccacttcaccccacaatctttggtctggatttctttttattttcttttcaacttgaaagaaactggacattaggccactatgtgttgttactgccactagtgttcaagtgcctcttgttttcccagagatttcctgggtctgccagaggcccagacaggctcactcaagctctttaactgaaaagcaacaagccactccaggacaaggttcaaaatggttacaacagcctctacctgtcgccccagggagaaaggggtagtgatacaagtctcatagccagagatggttttccactccttctagatattcccaaaaagaggctgagacaggaggttattttcaattttattttggaattaaatacttttttccctttattactgttgtagtccctcacttggatatacctctgttttcacgatagaaataagggaggtctagagcttctattccttggccattgtcaacggagagctggccaagtcttcacaaacccttgcaacattgcctgaagtttatggaataagatgtattctcactcccttgatctcaagggcgtaactctggaagcacagcttgactacacgtcatttttaccaatgattttcaggtgacctgggctaagtcatttaaactgggtctttataaaagtaaaaggccaacatttaattattttgcaaagcaacctaagagctaaagatgtaatttttcttgcaattgtaaatcttttgtgtctcctgaagacttcccttaaaattagctctgagtgaaaaatcaaaagagacaaaagacatcttcgaatccatatttcaagcctggtagaattggcttttctagcagaacctttccaaaagttttatattgagattcataacaacaccaagaattgattttgtagccaacattcattcaatactgttatatcagaggagtaggagagaggaaacatttgacttatctggaaaagcaaaatgtacttaagaataagaataacatggtccattcacctttatgttatagatatgtctttgtgtaaatcatttgttttgagttttcaaagaatagcccattgttcattcttgtgctgtacaatgaccactgttattgttactttgacttttcagagcacacccttcctctggtttttgtatatttattgatggatcaataataatgaggaaagcatgatatgtatattgctgagttgaaagcacttattggaaaatattaaaaggctaacattaaaagactaaaggaaacagactcagaa

SEQ ID NO: 668 - DNA, 3384 bp, Homo sapiens
ggcgccgtacgtgcgcgcgcgcggcggcccagaaagcggcgctgggaccctgaggcggccgtggttaggcggctccccggcggctcctccgcggcggtgacggcgaccgcactccccgcttcccgctccccgcgctcctccgcccgggtccgccagccgaggccgctcccgagcgtcggaagatgccggccgtgtccaagggggacgggatgcggggcctggcggtcttcatgctcggatatccgcaactgtaaaagtaaagaagcagaaataaaaaggataaacaaggaactggcaaatatcagatcaaaatttaaaggtgacaaggctcttgatggctatagtaaaaaaaagtacgtctgcaagttgctcttcatctttctccttggtcatgacattgactttggacacatggaggctgtgaacctgctgagttcaaacagatacacggaaaagcagatcggctaccttttcatctctgtgttggtgaactcaaacagtgagctgatccgcctgatcaacaacgccatcaagaatgacctggccagccgcaaccccaccttcatgggcctggccctgcactgcatcgccagcgtgggcagccgggagatggccgaggccttcgccggggagatccctaaggtcctcgtagccggagacactatggacagcgtgaagcagagcgcggccctgtgcttgctgcgcctgtacaggacgtcccccgatcttgtccccatgggcgactggacatcccgagtggtgcacctgctcaatgaccagcacttgggtgtggtaactgcagccacaagtctgatcaccactttagcacagaagaacccagaagagtttaaaacctccgtgtctctggctgtctctaggctaagcagaatcgtgacgtctgcatccacagatctccaggattacacttactattttgtcccggctccctggctgtctgtcaaactgctgagactgctgcagtgctacccacccccagaagaccctgcagtgcgaggccgcctgactgagtgcctggagaccatcctgaacaaagcccaagaaccgcccaagtcgaagaaggtccagcactccaacgcgaagaatgccgtgctcttcgaggccatcagcttaatcattcaccatgacagtgagccgaacctgctcgtccgtgcctgcaaccagttgggccagtttctgcagcaccgcgagaccaacctgcgctacctggccctggagagcatgtgcacgctggccagctctgagttctcccatgaggctgtcaagacgcacatcgagacggtcatcaacgccctgaaggcgaactgagcgggacgtgagcgtgcggcagcgggccgtggacctcctctacgccatgtgcgaccgcagcaacgccccacagatcgtggccgagatgctgagctatctggagacagctgactactccatccgagaagagattgtgctgaaggtcgccatcctggctgagaagtacgcggtggactacacctggtatgtggataccatcttgaacttgatccgaattgctggtgattacgtgagtgaagaggtgtggtaccgagtcattcagatcgtcatcaaccgggacgacgtgcagggctacgcggccaagactgtgttcgaggctcttcaggctcccgcgtgccacgagaacctggtcaaagtgggcggctacatcctgggggagtttggaaacttgatagctggagacccgagatccagcccgctgatccagttccacctgctgcactccaagttccacctgtgcagcgtccccacccgcgcgctgctcctgtccacctacatcaagttcgtgaacctcttcccggaggtgaagcccaccatccaggacgtgctgcgcagcgacagccagctcaggaacgcagacgtggagctgcagcagcgtgctgtggagtacctgcggctcagcaccgtggccagcaccgacattctggcgaccgtgctggaggagatgcccccattcccggagcgggagtcctccatcttggcaaagctcaagaagaagaagggccccagcacggtgacagacctggaggacaccaagcgggacaggagtgtggacgtgaacgggggtcctgagcctgccccagccagtaccagcgccgtgtctacgccttctccgtcggcagacctgctgggtctcggggctgccccccctgcccccgcgggccccccaccctcctccggcggcagcgggctgctcgtggacgtgttctcagactcggcctctgtggtcgcgcctctcgctcctggctccgaagacaactttgccaggtttgtttgtaaaaacaatggtgtgttgtttgaaaaccagctgcttcaaattggacttaagtctgaatttcggcagaatttaggtcggatgtttatcttttatggtaataagacctccacgcagttcctaaactttaccccaacactaatctgttcagacgaccttcagcctaatatcctggattccttaacgcacgcacacctgaacctgcagaccaagcccgtggacccgaccgtggaggggggcgcgcaggtgcagcaggtggtcaacatagagtgcgtgtccgacttcacggaggcgccagtcctcaacattcagttcaggtatgggggcaccttccagaacgtgtctgtgcagctgcccatcactctcaacaaattcttccagccgacagaaatggcttctcaggatttctttcaacgttggaagcagttgagcaatccacagcaggaagtgcagaacatcttcaaagcaaagcacccaatggacacagaagtcaccaaagccaagatcattggatttggttctgcacttcttgaagaagttgatcctaatcctgcgaatttcgtgggagctggaatcatccacacgaaaaccacccagattggatgcctgctgcgcttggagccgaacctgcaagcccagatgtaccggctcacgctgcgcacaagtaaggaagccgtttctcagagattatgtgaattgctctcagcgcagttttagtcctgaggatggaagaccaggctcgtgtgtcttgtgttgtcttcgtctgtgccgtttgtcttcgtggccatccttgtggctcaggaggaaaagctcagcctggactgtggcagccacggcagaaggtggatcttgggatcaatttttataaaaatcgagacagttctgtggttaaatctacaaattaaagggaaattagaagttggcgtgaacgtggcgtttgtgggagtgtcactgagatggcccgtgctgccgctgctccccgaggcaccgcttccctgtgcggcgctgcagaggggccctcagtgtggcactcctcgtcaaagaaaaataaaggctagaactgc

SEQ ID NO: 669 - DNA, 3169 bp, Homo sapiens
gccgagcttggttctggtcccagccggatgtggggggctcggggtccccggttcgctttggggacggttgctgcggtctgttttgggttgttctgaagtccctggactcagcttggcttggagacccagggcagccgggctgggtcgggctcgcgggtggcggcgatttcgaggtgcctggatgcagctggacctgagcgtcccgggacactgagcatgcggggcgtgtggccgcccccggtgtccgccctgctgtcggcgctggggatgtcgacgtacaagcgggccacgctggacgaggaggacctggtggactcgctctccgagggcgacgcataccccaacggcctgcaggtgaacttccacagcccccggagtggccagaggtgctgggctgcacggacccaggtggagaagcggctggtggtgttggtggtacttctggcggcaggactggtggcctgcttggcagcactgggcatccagtaccagacaagatccccctctgtgtgcctgagcgaagcttgtgtctcagtgaccagctccatcttgagctccatggaccccacagtggacccctgccatgacttcttcagctacgcctgtgggggctggatcaaggccaacccagtccctgatggccactcacgctgggggaccttcagcaacctctgggaacacaaccaagcaatcatcaagcacctcctcgaaaactccacggccagcgtgagcgaggcagagagaaaggcgcaagtatactaccgtgcgtgcatgaacgagaccaggatcgaggagctcagggccaaacctctaatggagttgattgagaggctcgggggctggaacatcacaggtccctgggccaaggacaacttccaggacaccctgcaggtggtcaccgcccactaccgcacctcacccttcttctctgtctatgtcagtgccgattccaagaactccaacagcaacgtgatccaggtggaccagtctggcctgggcttgccctcgagagactattacctgaacaaaactgaaaacgagaaggtgctgaccggatatctgaactacatggtccagctggggaagctgctgggcggcggggacgaggaggccatccggccccagatgcagcagatcttggactttgagacggcactggccaacatcaccatcccacaggagaagcgccgtgatgaggagctcatctaccacaaagtgacggcagccgagctgcagaccttggcacccgccatcaactggttgccttttctcaacaccatcttctaccccgtggagatcaatgaatccgagcctattgtggtctatgacaaggaataccttgagcagatctccactctcatcaacaccaccgacagatgcctgctcaacaactacatgatctggaacctggtgcggaaaacaagctccttccttgaccagcgctttcaggacgccgatgagaagttcatggaagtcatgtacgggaccaagaagacctgtcttcctcgctggaagttttgcgtgagtgacacagaaaacaacctgggctttgcgttgggccccatgtttgtcaaagcaaccttcgccgaggacagcaagagcatagccaccgagatcatcctggagattaagaaggcatttgaggaaagcctgagcaccctgaagtggatggatgaggaaacccgaaaatcagccaaggaaaaggccgatgccatctacaacatgataggataccccaacttcatcatggatcccaaggagctggacaaagtgtttaatgactacactgcagttccagacctctactttgaaaatgccatgcggtttttcaacttctcatggagggtcactgccgatcagctcaggaaagcccccaacagagatcagtggagcatgaccccgcccatggtgaacgcctactactcgcccaccaagaatgagattgtgtttccggccgggatcctgcaggcaccattctacacacgctcctcacccaaggccttaaactttggtggcataggtgtcgtcgtgggccatgagctgactcatgcttttgatgatcaaggacgggagtatgacaaggacgggaacctccggccatggtggaagaactcatccgtggaggccttcaagcgtcagaccgagtgcatggtagagcagtacagcaactacagcgtgaacggggagccggtgaacgggcggcacaccctgggggagaacatcgccgacaacgggggtctcaaggcggcctatcgggcttaccagaactgggtgaagaagaacggggctgagcactcgctccccaccctgggcctcaccaataaccagctcttcttcctgggctttgcacaggtctggtgctccgtccgcacacctgagagctcccacgaaggcctcatcaccgatccccacagcccctctcgcttccgggtcatcggctccctctccaattccaaggagttctcagaacacttccgctgcccacctggctcacccatgaacccgcctcacaagtgcgaagtctggtaaggacgaagcggagagagccaagacggaggaggggaaggggctgaggacgagacccccatccagcctccagggcattgctcagcccgcttggccacccggggccctgcttcctcacactggcgggttttcagccggaaccgagcccatggtgttggctctcaacgtgacccgcagtctgatcccctgtgaagagccggacatcccaggcacacgtgtgcgccaccttcagcaggcattcgggtgctgggctggtggctcatcaggcctgggccccacactgacaagcgccagatacgccacaaataccactgtgtcaaatgctttcaagatatatttttggggaaactattttttaaacactgtggaatacactggaaatcttcagggaaaaacacatttaaacacttttttttttaaggaaagaattggtatatttattatgttctgtttttctaaataacctgaagcccctgccactgccactacccgctccagagctttaaggaaaatgaagtgagacccctccccttaggcctggggagccatagggctggcttctctgtgggtgcgtggacgtggggttgggagctgggaatctattttttgtattatgttttgagctactgtagttttggcgtgg

SEQ ID NO: 670 - DNA, 3083 bp, Homo sapiens
gagcgcgccgcctgggccaggcagccgagccgtccgagcagctgggctgggagcagggaacccggagctgggaatcgggagccgggcgcggggagctgcgcgaagccggggcggagcacgcgagctatgcatgcggggcgtgtggccgcccccggtgtccgccctgctgtcggcgctggggatgtcgacgtacaagcgggccacgctggacgaggaggacctggtggactcgctctccgagggcgacgcataccccaacggcctgcaggtgaacttccacagcccccggagtggccagaggtgctgggctgcacggacccaggtggagaagcggctggtggtgttggtggtacttctggcggcaggactggtggcctgcttggcagcactgggcatccagtaccagacaagatccccctctgtgtgcctgagcgaagcttgtgtctcagtgaccagctccatcttgagctccatggaccccacagtggacccctgccatgacttcttcagctacgcctgtgggggctggatcaaggccaacccagtccctgatggccactcacgctgggggaccttcagcaacctctgggaacacaaccaagcaatcatcaagcacctcctcgaaaactccacggccagcgtgagcgaggcagagagaaaggcgcaagtatactaccgtgcgtgcatgaacgagaccaggatcgaggagctcagggccaaacctctaatggagttgattgagaggctcgggggctggaacatcacaggtccctgggccaaggacaacttccaggacaccctgcaggtggtcaccgcccactaccgcacctcacccttcttctctgtctatgtcagtgccgattccaagaactccaacagcaacgtgatccaggtggaccagtctggcctgggcttgccctcgagagactattacctgaacaaaactgaaaacgagaaggtgctgaccggatatctgaactacatggtccagctggggaagctgctgggcggcggggacgaggaggccatccggccccagatgcagcagatcttggactttgagacggcactggccaacatcaccatcccacaggagaagcgccgtgatgaggagctcatctaccacaaagtgacggcagccgagctgcagaccttggcacccgccatcaactggttgccttttctcaacaccatcttctaccccgtggagatcaatgaatccgagcctattgtggtctatgacaaggaataccttgagcagatctccactctcatcaacaccaccgacagatgcctgctcaacaactacatgatctggaacctggtgcggaaaacaagctccttccttgaccagcgctttcaggacgccgatgagaagttcatggaagtcatgtacgggaccaagaagacctgtcttcctcgctggaagttttgcgtgagtgacacagaaaacaacctgggctttgcgttgggccccatgtttgtcaaagcaaccttcgccgaggacagcaagagcatagccaccgagatcatcctggagattaagaaggcatttgaggaaagcctgagcaccctgaagtggatggatgaggaaacccgaaaatcagccaaggaaaaggccgatgccatctacaacatgataggataccccaacttcatcatggatcccaaggagctggacaaagtgtttaatgactacactgcagttccagacctctactttgaaaatgccatgcggtttttcaacttctcatggagggtcactgccgatcagctcaggaaagcccccaacagagatcagtggagcatgaccccgcccatggtgaacgcctactactcgcccaccaagaatgagattgtgtttccggccgggatcctgcaggcaccattctacacacgctcctcacccaaggccttaaactttggtggcataggtgtcgtcgtgggccatgagctgactcatgcttttgatgatcaaggacgggagtatgacaaggacgggaacctccggccatggtggaagaactcatccgtggaggccttcaagcgtcagaccgagtgcatggtagagcagtacagcaactacagcgtgaacggggagccggtgaacgggcggcacaccctgggggagaacatcgccgacaacgggggtctcaaggcggcctatcgggcttaccagaactgggtgaagaagaacggggctgagcactcgctccccaccctgggcctcaccaataaccagctcttcttcctgggctttgcacaggtctggtgctccgtccgcacacctgagagctcccacgaaggcctcatcaccgatccccacagcccctctcgcttccgggtcatcggctccctctccaattccaaggagttctcagaacacttccgctgcccacctggctcacccatgaacccgcctcacaagtgcgaagtctggtaaggacgaagcggagagagccaagacggaggaggggaaggggctgaggacgagacccccatccagcctccagggcattgctcagcccgcttggccacccggggccctgcttcctcacactggcgggttttcagccggaaccgagcccatggtgttggctctcaacgtgacccgcagtctgatcccctgtgaagagccggacatcccaggcacacgtgtgcgccaccttcagcaggcattcgggtgctgggctggtggctcatcaggcctgggccccacactgacaagcgccagatacgccacaaataccactgtgtcaaatgctttcaagatatatttttggggaaactattttttaaacactgtggaatacactggaaatcttcagggaaaaacacatttaaacacttttttttttaaggaaagaattggtatatttattatgttctgtttttctaaataacctgaagcccctgccactgccactacccgctccagagctttaaggaaaatgaagtgagacccctccccttaggcctggggagccatagggctggcttctctgtgggtgcgtggacgtggggttgggagctgggaatctattttttgtattatgttttgagctactgtagttttggcgtgg

SEQ ID NO: 671 - DNA, 4140 bp, Homo sapiens
catgcggggcgtgtggccgcccccggtgtccgccctgctgtcggcgctggggatgtcgacgtacaagcgggccacgctggacgaggaggacctggtggactcgctctccgagggcgacgcataccccaacggcctgcaggtgaacttccacagcccccggagtggccagaggtgctgggctgcacggacccaggtggagaagcggctggtggtgttggtggtacttctggcggcaggactggtggcctgcttggcagcactgggcatccagtaccagacaagatccccctctgtgtgcctgagcgaagcttgtgtctcagtgaccagctccatcttgagctccatggaccccacagtggacccctgccatgacttcttcagctacgcctgtgggggctggatcaaggccaacccagtccctgatggccactcacgctgggggaccttcagcaacctctgggaacacaaccaagcaatcatcaagcacctcctcgaaaactccacggccagcgtgagcgaggcagagagaaaggcgcaagtatactaccgtgcgtgcatgaacgagaccaggatcgaggagctcagggccaaacctctaatggagttgattgagaggctcgggggctggaacatcacaggtccctgggccaaggacaacttccaggacaccctgcaggtggtcaccgcccactaccgcacctcacccttcttctctgtctatgtcagtgccgattccaagaactccaacagcaacgtgatccaggtggaccagtctggcctgggcttgccctcgagagactattacctgaacaaaactgaaaacgagaaggtgctgaccggatatctgaactacatggtccagctggggaagctgctgggcggcggggacgaggaggccatccggccccagatgcagcagatcttggactttgagacggcactggccaacatcaccatcccacaggagaagcgccgtgatgaggagctcatctaccacaaagtgacggcagccgagctgcagaccttggcacccgccatcaactggttgccttttctcaacaccatcttctaccccgtggagatcaatgaatccgagcctattgtggtctatgacaaggaataccttgagcagatctccactctcatcaacaccaccgacagatgcctgctcaacaactacatgatctggaacctggtgcggaaaacaagctccttccttgaccagcgctttcaggacgccgatgagaagttcatggaagtcatgtacgggaccaagaagacctgtcttcctcgctggaagttttgcgtgagtgacacagaaaacaacctgggctttgcgttgggccccatgtttgtcaaagcaaccttcgccgaggacagcaagagcatagccaccgagatcatcctggagattaagaaggcatttgaggaaagcctgagcaccctgaagtggatggatgaggaaacccgaaaatcagccaaggaaaaggccgatgccatctacaacatgataggataccccaacttcatcatggatcccaaggagctggacaaagtgtttaatgactacactgcagttccagacctctactttgaaaatgccatgcggtttttcaacttctcatggagggtcactgccgatcagctcaggaaagcccccaacagagatcagtggagcatgaccccgcccatggtgaacgcctactactcgcccaccaagaatgagattgtgtttccggccgggatcctgcaggcaccattctacacacgctcctcacccaaggccttaaactttggtggcataggtgtcgtcgtgggccatgagctgactcatgcttttgatgatcaaggacgggagtatgacaaggacgggaacctccggccatggtggaagaactcatccgtggaggccttcaagcgtcagaccgagtgcatggtagagcagtacagcaactacagcgtgaacggggagccggtgaacgggcggcacaccctgggggagaacatcgccgacaacgggggtctcaaggcggcctatcgggcttaccagaactgggtgaagaagaacggggctgagcactcgctccccaccctgggcctcaccaataaccagctcttcttcctgggctttgcacaggtctggtgctccgtccgcacacctgagagctcccacgaaggcctcatcaccgatccccacagcccctctcgcttccgggtcatcggctccctctccaattccaaggagttctcagaacacttccgctgcccacctggctcacccatgaacccgcctcacaagtgcgaagtctggtaaggacgaagcggagagagccaagacggaggaggggaaggggctgaggacgagacccccatccagcctccagggcattgctcagcccgcttggccacccggggccctgcttcctcacactggcgggttttcagccggaaccgagcccatggtgttggctctcaacgtgacccgcagtctgatcccctgtgaagagccggacatcccaggcacacgtgtgcgccaccttcagcaggcattcgggtgctgggctggtggctcatcaggcctgggccccacactgacaagcgccagatacgccacaaataccactgtgtcaaatgctttcaagatatatttttggggaaactattttttaaacactgtggaatacactggaaatcttcagggaaaaacacatttaaacacttttttttttaaggaaagaattggtatatttattatgttctgtttttctaaataacctgtggacaagggaagccccactgatttactccctctcttccccactccctgtgaggctgggctgaggcacggatccctgggccacagagcaagtctccaaatcagacagctgcctcagcccctgggatgtgtgatttcagctcctgtcacctcatgcaagggcgtggagaccagtagaggtgtggaggccaggcagagagaggagcctgctctgcggggggcccagctcatgggcactgccccttcagctagcctgcctccgtcccctgagtccaacagtgggagccctagctgggaagttctgatccccaaagccacagcaggggactgatggctatagcagaatgaggtcgggtcaggaccctcaaacaccatctgggaacaccaagcaccctgaatcgagactgcaggagccctgcggggtgagactgtgtcagagatacactgctggccacaagtgtcccctctcagtcccaccttttcgggctgtcccatgtctatctcaggggcccgttacctctctgcagcagtcccccatcccagccacaccagggtctgtccggccaaccctcttccccagggaaaggagaaaagagaaaacaggctgggcccggtggctcactcctgtaatcccagcactttgggaggttgaggtgggcggatcacctgaggtcaggagtttgagaccagcctggccaacgtggtgaaaccccatctctactaaaaaaaattacaaaaattagccgggagtggtggtgggcacctgtaatcccagttactcgggaggctgaggcaagagaatctcttgagctcaggaggcagaggttgcagtgagctgagattgcgccactgcactccagcctgggtgacagagggagactccgtcccaaaaaaaagaaaagagaaacagctgtcacctcccgcaggacccaaatcctctctctgagcaccgtcatccaccacatggctgggcctggctcccaggaccagtccagtcctctagtgccttatctgaggctgcagccgccagtctccaccccaaggagacagcccctgctcctagatgcccttggcctccgcagtgcagcccccaggtgtcctgactgaagcacaggccatagccccatttccccggtgcctgcagggctaacctccacgggagcccaggagctctggccggcaggtccatggcacagggcatcggaagactgcaaaactgctggacttaccctgggctgcagtccattgtcggcccctgggttgaatcaagatagtacttgcagctagatggatgcttttagccaggggacattgtgaggggaagattcctccacccagtctggcctgtggtgtctgtctcctcc

SEQ ID NO: 672 - DNA, 4269 bp, Homo sapiens
gagcgcgccgcctgggccaggcagccgagccgtccgagcagctgggctgggagcagggaacccggagctgggaatcgggagccgggcgcggggagctgcgcgaagccggggcggagcacgcgagctatgcatgcggggcgtgtggccgcccccggtgtccgccctgctgtcggcgctggggatgtcgacgtacaagcgggccacgctggacgaggaggacctggtggactcgctctccgagggcgacgcataccccaacggcctgcaggtgaacttccacagcccccggagtggccagaggtgctgggctgcacggacccaggtggagaagcggctggtggtgttggtggtacttctggcggcaggactggtggcctgcttggcagcactgggcatccagtaccagacaagatccccctctgtgtgcctgagcgaagcttgtgtctcagtgaccagctccatcttgagctccatggaccccacagtggacccctgccatgacttcttcagctacgcctgtgggggctggatcaaggccaacccagtccctgatggccactcacgctgggggaccttcagcaacctctgggaacacaaccaagcaatcatcaagcacctcctcgaaaactccacggccagcgtgagcgaggcagagagaaaggcgcaagtatactaccgtgcgtgcatgaacgagaccaggatcgaggagctcagggccaaacctctaatggagttgattgagaggctcgggggctggaacatcacaggtccctgggccaaggacaacttccaggacaccctgcaggtggtcaccgcccactaccgcacctcacccttcttctctgtctatgtcagtgccgattccaagaactccaacagcaacgtgatccaggtggaccagtctggcctgggcttgccctcgagagactattacctgaacaaaactgaaaacgagaaggtgctgaccggatatctgaactacatggtccagctggggaagctgctgggcggcggggacgaggaggccatccggccccagatgcagcagatcttggactttgagacggcactggccaacatcaccatcccacaggagaagcgccgtgatgaggagctcatctaccacaaagtgacggcagccgagctgcagaccttggcacccgccatcaactggttgccttttctcaacaccatcttctaccccgtggagatcaatgaatccgagcctattgtggtctatgacaaggaataccttgagcagatctccactctcatcaacaccaccgacagatgcctgctcaacaactacatgatctggaacctggtgcggaaaacaagctccttccttgaccagcgctttcaggacgccgatgagaagttcatggaagtcatgtacgggaccaagaagacctgtcttcctcgctggaagttttgcgtgagtgacacagaaaacaacctgggctttgcgttgggccccatgtttgtcaaagcaaccttcgccgaggacagcaagagcatagccaccgagatcatcctggagattaagaaggcatttgaggaaagcctgagcaccctgaagtggatggatgaggaaacccgaaaatcagccaaggaaaaggccgatgccatctacaacatgataggataccccaacttcatcatggatcccaaggagctggacaaagtgtttaatgactacactgcagttccagacctctactttgaaaatgccatgcggtttttcaacttctcatggagggtcactgccgatcagctcaggaaagcccccaacagagatcagtggagcatgaccccgcccatggtgaacgcctactactcgcccaccaagaatgagattgtgtttccggccgggatcctgcaggcaccattctacacacgctcctcacccaaggccttaaactttggtggcataggtgtcgtcgtgggccatgagctgactcatgcttttgatgatcaaggacgggagtatgacaaggacgggaacctccggccatggtggaagaactcatccgtggaggccttcaagcgtcagaccgagtgcatggtagagcagtacagcaactacagcgtgaacggggagccggtgaacgggcggcacaccctgggggagaacatcgccgacaacgggggtctcaaggcggcctatcgggcttaccagaactgggtgaagaagaacggggctgagcactcgctccccaccctgggcctcaccaataaccagctcttcttcctgggctttgcacaggtctggtgctccgtccgcacacctgagagctcccacgaaggcctcatcaccgatccccacagcccctctcgcttccgggtcatcggctccctctccaattccaaggagttctcagaacacttccgctgcccacctggctcacccatgaacccgcctcacaagtgcgaagtctggtaaggacgaagcggagagagccaagacggaggaggggaaggggctgaggacgagacccccatccagcctccagggcattgctcagcccgcttggccacccggggccctgcttcctcacactggcgggttttcagccggaaccgagcccatggtgttggctctcaacgtgacccgcagtctgatcccctgtgaagagccggacatcccaggcacacgtgtgcgccaccttcagcaggcattcgggtgctgggctggtggctcatcaggcctgggccccacactgacaagcgccagatacgccacaaataccactgtgtcaaatgctttcaagatatatttttggggaaactattttttaaacactgtggaatacactggaaatcttcagggaaaaacacatttaaacacttttttttttaaggaaagaattggtatatttattatgttctgtttttctaaataacctgtggacaagggaagccccactgatttactccctctcttccccactccctgtgaggctgggctgaggcacggatccctgggccacagagcaagtctccaaatcagacagctgcctcagcccctgggatgtgtgatttcagctcctgtcacctcatgcaagggcgtggagaccagtagaggtgtggaggccaggcagagagaggagcctgctctgcggggggcccagctcatgggcactgccccttcagctagcctgcctccgtcccctgagtccaacagtgggagccctagctgggaagttctgatccccaaagccacagcaggggactgatggctatagcagaatgaggtcgggtcaggaccctcaaacaccatctgggaacaccaagcaccctgaatcgagactgcaggagccctgcggggtgagactgtgtcagagatacactgctggccacaagtgtcccctctcagtcccaccttttcgggctgtcccatgtctatctcaggggcccgttacctctctgcagcagtcccccatcccagccacaccagggtctgtccggccaaccctcttccccagggaaaggagaaaagagaaaacaggctgggcccggtggctcactcctgtaatcccagcactttgggaggttgaggtgggcggatcacctgaggtcaggagtttgagaccagcctggccaacgtggtgaaaccccatctctactaaaaaaaattacaaaaattagccgggagtggtggtgggcacctgtaatcccagttactcgggaggctgaggcaagagaatctcttgagctcaggaggcagaggttgcagtgagctgagattgcgccactgcactccagcctgggtgacagagggagactccgtcccaaaaaaaagaaaagagaaacagctgtcacctcccgcaggacccaaatcctctctctgagcaccgtcatccaccacatggctgggcctggctcccaggaccagtccagtcctctagtgccttatctgaggctgcagccgccagtctccaccccaaggagacagcccctgctcctagatgcccttggcctccgcagtgcagcccccaggtgtcctgactgaagcacaggccatagccccatttccccggtgcctgcagggctaacctccacgggagcccaggagctctggccggcaggtccatggcacagggcatcggaagactgcaaaactgctggacttaccctgggctgcagtccattgtcggcccctgggttgaatcaagatagtacttgcagctagatggatgcttttagccaggggacattgtgaggggaagattcctccacccagtctggcctgtggtgtctgtctcctcc

SEQ ID NO: 673 - DNA, 4389 bp, Homo sapiens
gagcgcgccgcctgggccaggcagccgagccgtccgagcagctgggctgggagcagggaacccggagctgggaatcgggagccgggcgcggggagctgcgcgaagccggggcggagcacgcgagctatgcatgcggggcgtgtggccgcccccggtgtccgccctgctgtcggcgctggggatgtcgacgtacaagcgggccacgctggacgaggaggacctggtggactcgctctccgagggcgacgcataccccaacggcctgcaggtgaacttccacagcccccggagtggccagaggtgctgggctgcacggacccaggtggagaagcggctggtggtgttggtggtacttctggcggcaggactggtggcctgcttggcagcactgggcatccagtaccagacaagatccccctctgtgtgcctgagcgaagcttgtgtctcagtgaccagctccatcttgagctccatggaccccacagtggacccctgccatgacttcttcagctacgcctgtgggggctggatcaaggccaacccagtccctgatggccactcacgctgggggaccttcagcaacctctgggaacacaaccaagcaatcatcaagcacctcctcgaaaactccacggccagcgtgagcgaggcagagagaaaggcgcaagtatactaccgtgcgtgcatgaacgagaccaggatcgaggagctcagggccaaacctctaatggagttgattgagaggctcgggggctggaacatcacaggtccctgggccaaggacaacttccaggacaccctgcaggtggtcaccgcccactaccgcacctcacccttcttctctgtctatgtcagtgccgattccaagaactccaacagcaacgtgatccaggtggaccagtctggcctgggcttgccctcgagagactattacctgaacaaaactgaaaacgagaaggtgctgaccggatatctgaactacatggtccagctggggaagctgctgggcggcggggacgaggaggccatccggccccagatgcagcagatcttggactttgagacggcactggccaacatcaccatcccacaggagaagcgccgtgatgaggagctcatctaccacaaagtgacggcagccgagctgcagaccttggcacccgccatcaactggttgccttttctcaacaccatcttctaccccgtggagatcaatgaatccgagcctattgtggtctatgacaaggaataccttgagcagatctccactctcatcaacaccaccgacagatgcctgctcaacaactacatgatctggaacctggtgcggaaaacaagctccttccttgaccagcgctttcaggacgccgatgagaagttcatggaagtcatgtacgggaccaagaagacctgtcttcctcgctggaagttttgcgtgagtgacacagaaaacaacctgggctttgcgttgggccccatgtttgtcaaagcaaccttcgccgaggacagcaagagcatagccaccgagatcatcctggagattaagaaggcatttgaggaaagcctgagcaccctgaagtggatggatgaggaaacccgaaaatcagccaaggaaaaggccgatgccatctacaacatgataggataccccaacttcatcatggatcccaaggagctggacaaagtgtttaatgactacactgcagttccagacctctactttgaaaatgccatgcggtttttcaacttctcatggagggtcactgccgatcagctcaggaaagcccccaacagagatcagtggagcatgaccccgcccatggtgaacgcctactactcgcccaccaagaatgagattgtgtttccggccgggatcctgcaggcaccattctacacacgctcctcacccaaggccttaaactttggtggcataggtgtcgtcgtgggccatgagctgactcatgcttttgatgatcaaggacgggagtatgacaaggacgggaacctccggccatggtggaagaactcatccgtggaggccttcaagcgtcagaccgagtgcatggtagagcagtacagcaactacagcgtgaacggggagccggtgaacgggcggcacaccctgggggagaacatcgccgacaacgggggtctcaaggcggcctatcgggcttaccagaactgggtgaagaagaacggggctgagcactcgctccccaccctgggcctcaccaataaccagctcttcttcctgggctttgcacaggtctggtgctccgtccgcacacctgagagctcccacgaaggcctcatcaccgatccccacagcccctctcgcttccgggtcatcggctccctctccaattccaaggagttctcagaacacttccgctgcccacctggctcacccatgaacccgcctcacaagtgcgaagtctggtaaggacgaagcggagagagccaagacggaggaggggaaggggctgaggacgagacccccatccagcctccagggcattgctcagcccgcttggccacccggggccctgcttcctcacactggcgggttttcagccggaaccgagcccatggtgttggctctcaacgtgacccgcagtctgatcccctgtgaagagccggacatcccaggcacacgtgtgcgccaccttcagcaggcattcgggtgctgggctggtggctcatcaggcctgggccccacactgacaagcgccagatacgccacaaataccactgtgtcaaatgctttcaagatatatttttggggaaactattttttaaacactgtggaatacactggaaatcttcagggaaaaacacatttaaacacttttttttttaaggaaagaattggtatatttattatgttctgtttttctaaataacctgtggacaagggaagccccactgatttactccctctcttccccactccctgtgaggctgggctgaggcacggatccctgggccacagagcaagtctccaaatcagacagctgcctcagcccctgggatgtgtgatttcagctcctgtcacctcatgcaagggcgtggagaccagtagaggtgtggaggccaggcagagagaggagcctgctctgcggggggcccagctcatgggcactgccccttcagctagcctgcctccgtcccctgagtccaacagtgggagccctagctgggaagttctgatccccaaagccacagcaggggactgatggctatagcagaatgaggtcgggtcaggaccctcaaacaccatctgggaacaccaagcaccctgaatcgagactgcaggagccctgcggggtgagactgtgtcagagatacactgctggccacaagtgtcccctctcagtcccaccttttcgggctgtcccatgtctatctcaggggcccgttacctctctgcagcagtcccccatcccagccacaccagggtctgtccggccaaccctcttccccagggaaaggagaaaagagttgaggtgggcggatcacctgaggtcaggagtttgagaccagcctggccaacgtggtgaaaccccatctctactaaaaaaaattacaaaaattagccgggagtggtggtgggcacctgtaatcccagttactcgggaggctgaggcaagagaatctcttgagctcaggaggcagaggttgcagtgagctgagattgcgccactgcactccagcctgggtgacagagggagactccgtcccaaaaaaaagaaaagagaaacagctgtcacctcccgcaggacccaaatcctctctctgagcaccgtcatccaccacatggctgggcctggctcccaggaccagtccagtcctctagtgccttatctgaggctgcagccgccagtctccaccccaaggagacagcccctgctcctagatgcccttggcctccgcagtgcagcccccaggtgtcctgactgaagcacaggccatagccccatttccccggtgcctgcagggctaacctccacgggagcccaggagctctggccggcaggtccatggcacagggcatcggaagactgcaaaactgctggacttaccctgggctgcagtccattgtcggcccctgggttgaatcaagatagtacttgcagctagatggatgcttttagccaggggacattgtgaggggaagattcctccacccagtctggcctgtggtgtctgtctcctccctggaatcctcctgcccgagaggaagcagacggcacagggacacccctgccaccttgggatctgcctccaagctggtgcagggtatcgagagtggattccagatggaggtcctggtcccagcacgcagcagtcctggtagctctgcagaggagacaggaacccgagaagtag

SEQ ID NO: 674 - DNA, 4145 bp, Homo sapiens
tcgggcgcgagagccatggaggcgctgagggagtccgtgctgcatttggccttgcagatgtcgacgtacaagcgggccacgctggacgaggaggacctggtggactcgctctccgagggcgacgcataccccaacggcctgcaggtgaacttccacagcccccggagtggccagaggtgctgggctgcacggacccaggtggagaagcggctggtggtgttggtggtacttctggcggcaggactggtggcctgcttggcagcactgggcatccagtaccagacaagatccccctctgtgtgcctgagcgaagcttgtgtctcagtgaccagctccatcttgagctccatggaccccacagtggacccctgccatgacttcttcagctacgcctgtgggggctggatcaaggccaacccagtccctgatggccactcacgctgggggaccttcagcaacctctgggaacacaaccaagcaatcatcaagcacctcctcgaaaactccacggccagcgtgagcgaggcagagagaaaggcgcaagtatactaccgtgcgtgcatgaacgagaccaggatcgaggagctcagggccaaacctctaatggagttgattgagaggctcgggggctggaacatcacaggtccctgggccaaggacaacttccaggacaccctgcaggtggtcaccgcccactaccgcacctcacccttcttctctgtctatgtcagtgccgattccaagaactccaacagcaacgtgatccaggtggaccagtctggcctgggcttgccctcgagagactattacctgaacaaaactgaaaacgagaaggtgctgaccggatatctgaactacatggtccagctggggaagctgctgggcggcggggacgaggaggccatccggccccagatgcagcagatcttggactttgagacggcactggccaacatcaccatcccacaggagaagcgccgtgatgaggagctcatctaccacaaagtgacggcagccgagctgcagaccttggcacccgccatcaactggttgccttttctcaacaccatcttctaccccgtggagatcaatgaatccgagcctattgtggtctatgacaaggaataccttgagcagatctccactctcatcaacaccaccgacagatgcctgctcaacaactacatgatctggaacctggtgcggaaaacaagctccttccttgaccagcgctttcaggacgccgatgagaagttcatggaagtcatgtacgggaccaagaagacctgtcttcctcgctggaagttttgcgtgagtgacacagaaaacaacctgggctttgcgttgggccccatgtttgtcaaagcaaccttcgccgaggacagcaagagcatagccaccgagatcatcctggagattaagaaggcatttgaggaaagcctgagcaccctgaagtggatggatgaggaaacccgaaaatcagccaaggaaaaggccgatgccatctacaacatgataggataccccaacttcatcatggatcccaaggagctggacaaagtgtttaatgactacactgcagttccagacctctactttgaaaatgccatgcggtttttcaacttctcatggagggtcactgccgatcagctcaggaaagcccccaacagagatcagtggagcatgaccccgcccatggtgaacgcctactactcgcccaccaagaatgagattgtgtttccggccgggatcctgcaggcaccattctacacacgctcctcacccaaggccttaaactttggtggcataggtgtcgtcgtgggccatgagctgactcatgcttttgatgatcaaggacgggagtatgacaaggacgggaacctccggccatggtggaagaactcatccgtggaggccttcaagcgtcagaccgagtgcatggtagagcagtacagcaactacagcgtgaacggggagccggtgaacgggcggcacaccctgggggagaacatcgccgacaacgggggtctcaaggcggcctatcgggcttaccagaactgggtgaagaagaacggggctgagcactcgctccccaccctgggcctcaccaataaccagctcttcttcctgggctttgcacaggtctggtgctccgtccgcacacctgagagctcccacgaaggcctcatcaccgatccccacagcccctctcgcttccgggtcatcggctccctctccaattccaaggagttctcagaacacttccgctgcccacctggctcacccatgaacccgcctcacaagtgcgaagtctggtaaggacgaagcggagagagccaagacggaggaggggaaggggctgaggacgagacccccatccagcctccagggcattgctcagcccgcttggccacccggggccctgcttcctcacactggcgggttttcagccggaaccgagcccatggtgttggctctcaacgtgacccgcagtctgatcccctgtgaagagccggacatcccaggcacacgtgtgcgccaccttcagcaggcattcgggtgctgggctggtggctcatcaggcctgggccccacactgacaagcgccagatacgccacaaataccactgtgtcaaatgctttcaagatatatttttggggaaactattttttaaacactgtggaatacactggaaatcttcagggaaaaacacatttaaacacttttttttttaaggaaagaattggtatatttattatgttctgtttttctaaataacctgtggacaagggaagccccactgatttactccctctcttccccactccctgtgaggctgggctgaggcacggatccctgggccacagagcaagtctccaaatcagacagctgcctcagcccctgggatgtgtgatttcagctcctgtcacctcatgcaagggcgtggagaccagtagaggtgtggaggccaggcagagagaggagcctgctctgcggggggcccagctcatgggcactgccccttcagctagcctgcctccgtcccctgagtccaacagtgggagccctagctgggaagttctgatccccaaagccacagcaggggactgatggctatagcagaatgaggtcgggtcaggaccctcaaacaccatctgggaacaccaagcaccctgaatcgagactgcaggagccctgcggggtgagactgtgtcagagatacactgctggccacaagtgtcccctctcagtcccaccttttcgggctgtcccatgtctatctcaggggcccgttacctctctgcagcagtcccccatcccagccacaccagggtctgtccggccaaccctcttccccagggaaaggagaaaagagaaaacaggctgggcccggtggctcactcctgtaatcccagcactttgggaggttgaggtgggcggatcacctgaggtcaggagtttgagaccagcctggccaacgtggtgaaaccccatctctactaaaaaaaattacaaaaattagccgggagtggtggtgggcacctgtaatcccagttactcgggaggctgaggcaagagaatctcttgagctcaggaggcagaggttgcagtgagctgagattgcgccactgcactccagcctgggtgacagagggagactccgtcccaaaaaaaagaaaagagaaacagctgtcacctcccgcaggacccaaatcctctctctgagcaccgtcatccaccacatggctgggcctggctcccaggaccagtccagtcctctagtgccttatctgaggctgcagccgccagtctccaccccaaggagacagcccctgctcctagatgcccttggcctccgcagtgcagcccccaggtgtcctgactgaagcacaggccatagccccatttccccggtgcctgcagggctaacctccacgggagcccaggagctctggccggcaggtccatggcacagggcatcggaagactgcaaaactgctggacttaccctgggctgcagtccattgtcggcccctgggttgaatcaagatagtacttgcagctagatggatgcttttagccaggggacattgtgaggggaagattcctccacccagtctggcctgtggtgtctgtctcctcc

SEQ ID NO: 675 - DNA, 4265 bp, Homo sapiens
tcgggcgcgagagccatggaggcgctgagggagtccgtgctgcatttggccttgcagatgtcgacgtacaagcgggccacgctggacgaggaggacctggtggactcgctctccgagggcgacgcataccccaacggcctgcaggtgaacttccacagcccccggagtggccagaggtgctgggctgcacggacccaggtggagaagcggctggtggtgttggtggtacttctggcggcaggactggtggcctgcttggcagcactgggcatccagtaccagacaagatccccctctgtgtgcctgagcgaagcttgtgtctcagtgaccagctccatcttgagctccatggaccccacagtggacccctgccatgacttcttcagctacgcctgtgggggctggatcaaggccaacccagtccctgatggccactcacgctgggggaccttcagcaacctctgggaacacaaccaagcaatcatcaagcacctcctcgaaaactccacggccagcgtgagcgaggcagagagaaaggcgcaagtatactaccgtgcgtgcatgaacgagaccaggatcgaggagctcagggccaaacctctaatggagttgattgagaggctcgggggctggaacatcacaggtccctgggccaaggacaacttccaggacaccctgcaggtggtcaccgcccactaccgcacctcacccttcttctctgtctatgtcagtgccgattccaagaactccaacagcaacgtgatccaggtggaccagtctggcctgggcttgccctcgagagactattacctgaacaaaactgaaaacgagaaggtgctgaccggatatctgaactacatggtccagctggggaagctgctgggcggcggggacgaggaggccatccggccccagatgcagcagatcttggactttgagacggcactggccaacatcaccatcccacaggagaagcgccgtgatgaggagctcatctaccacaaagtgacggcagccgagctgcagaccttggcacccgccatcaactggttgccttttctcaacaccatcttctaccccgtggagatcaatgaatccgagcctattgtggtctatgacaaggaataccttgagcagatctccactctcatcaacaccaccgacagatgcctgctcaacaactacatgatctggaacctggtgcggaaaacaagctccttccttgaccagcgctttcaggacgccgatgagaagttcatggaagtcatgtacgggaccaagaagacctgtcttcctcgctggaagttttgcgtgagtgacacagaaaacaacctgggctttgcgttgggccccatgtttgtcaaagcaaccttcgccgaggacagcaagagcatagccaccgagatcatcctggagattaagaaggcatttgaggaaagcctgagcaccctgaagtggatggatgaggaaacccgaaaatcagccaaggaaaaggccgatgccatctacaacatgataggataccccaacttcatcatggatcccaaggagctggacaaagtgtttaatgactacactgcagttccagacctctactttgaaaatgccatgcggtttttcaacttctcatggagggtcactgccgatcagctcaggaaagcccccaacagagatcagtggagcatgaccccgcccatggtgaacgcctactactcgcccaccaagaatgagattgtgtttccggccgggatcctgcaggcaccattctacacacgctcctcacccaaggccttaaactttggtggcataggtgtcgtcgtgggccatgagctgactcatgcttttgatgatcaaggacgggagtatgacaaggacgggaacctccggccatggtggaagaactcatccgtggaggccttcaagcgtcagaccgagtgcatggtagagcagtacagcaactacagcgtgaacggggagccggtgaacgggcggcacaccctgggggagaacatcgccgacaacgggggtctcaaggcggcctatcgggcttaccagaactgggtgaagaagaacggggctgagcactcgctccccaccctgggcctcaccaataaccagctcttcttcctgggctttgcacaggtctggtgctccgtccgcacacctgagagctcccacgaaggcctcatcaccgatccccacagcccctctcgcttccgggtcatcggctccctctccaattccaaggagttctcagaacacttccgctgcccacctggctcacccatgaacccgcctcacaagtgcgaagtctggtaaggacgaagcggagagagccaagacggaggaggggaaggggctgaggacgagacccccatccagcctccagggcattgctcagcccgcttggccacccggggccctgcttcctcacactggcgggttttcagccggaaccgagcccatggtgttggctctcaacgtgacccgcagtctgatcccctgtgaagagccggacatcccaggcacacgtgtgcgccaccttcagcaggcattcgggtgctgggctggtggctcatcaggcctgggccccacactgacaagcgccagatacgccacaaataccactgtgtcaaatgctttcaagatatatttttggggaaactattttttaaacactgtggaatacactggaaatcttcagggaaaaacacatttaaacacttttttttttaaggaaagaattggtatatttattatgttctgtttttctaaataacctgtggacaagggaagccccactgatttactccctctcttccccactccctgtgaggctgggctgaggcacggatccctgggccacagagcaagtctccaaatcagacagctgcctcagcccctgggatgtgtgatttcagctcctgtcacctcatgcaagggcgtggagaccagtagaggtgtggaggccaggcagagagaggagcctgctctgcggggggcccagctcatgggcactgccccttcagctagcctgcctccgtcccctgagtccaacagtgggagccctagctgggaagttctgatccccaaagccacagcaggggactgatggctatagcagaatgaggtcgggtcaggaccctcaaacaccatctgggaacaccaagcaccctgaatcgagactgcaggagccctgcggggtgagactgtgtcagagatacactgctggccacaagtgtcccctctcagtcccaccttttcgggctgtcccatgtctatctcaggggcccgttacctctctgcagcagtcccccatcccagccacaccagggtctgtccggccaaccctcttccccagggaaaggagaaaagagttgaggtgggcggatcacctgaggtcaggagtttgagaccagcctggccaacgtggtgaaaccccatctctactaaaaaaaattacaaaaattagccgggagtggtggtgggcacctgtaatcccagttactcgggaggctgaggcaagagaatctcttgagctcaggaggcagaggttgcagtgagctgagattgcgccactgcactccagcctgggtgacagagggagactccgtcccaaaaaaaagaaaagagaaacagctgtcacctcccgcaggacccaaatcctctctctgagcaccgtcatccaccacatggctgggcctggctcccaggaccagtccagtcctctagtgccttatctgaggctgcagccgccagtctccaccccaaggagacagcccctgctcctagatgcccttggcctccgcagtgcagcccccaggtgtcctgactgaagcacaggccatagccccatttccccggtgcctgcagggctaacctccacgggagcccaggagctctggccggcaggtccatggcacagggcatcggaagactgcaaaactgctggacttaccctgggctgcagtccattgtcggcccctgggttgaatcaagatagtacttgcagctagatggatgcttttagccaggggacattgtgaggggaagattcctccacccagtctggcctgtggtgtctgtctcctccctggaatcctcctgcccgagaggaagcagacggcacagggacacccctgccaccttgggatctgcctccaagctggtgcagggtatcgagagtggattccagatggaggtcctggtcccagcacgcagcagtcctggtagctctgcagaggagacaggaacccgagaagtag

SEQ ID NO: 676 - DNA, 4162 bp, Homo sapiens
cctggattagggctgaatctgtgggaaccagaccacccctgagacaggaggcagccctgatgcctctccagggcctgggcctgcagcggaaccccttcctccaagggaagcggggcccggggctcacgtcttccccgcccctcctgcctccttccctgcaggtgaacttccacagcccccggagtggccagaggtgctgggctgcacggacccaggtggagaagcggctggtggtgttggtggtacttctggcggcaggactggtggcctgcttggcagcactgggcatccagtaccagacaagatccccctctgtgtgcctgagcgaagcttgtgtctcagtgaccagctccatcttgagctccatggaccccacagtggacccctgccatgacttcttcagctacgcctgtgggggctggatcaaggccaacccagtccctgatggccactcacgctgggggaccttcagcaacctctgggaacacaaccaagcaatcatcaagcacctcctcgaaaactccacggccagcgtgagcgaggcagagagaaaggcgcaagtatactaccgtgcgtgcatgaacgagaccaggatcgaggagctcagggccaaacctctaatggagttgattgagaggctcgggggctggaacatcacaggtccctgggccaaggacaacttccaggacaccctgcaggtggtcaccgcccactaccgcacctcacccttcttctctgtctatgtcagtgccgattccaagaactccaacagcaacgtgatccaggtggaccagtctggcctgggcttgccctcgagagactattacctgaacaaaactgaaaacgagaaggtgctgaccggatatctgaactacatggtccagctggggaagctgctgggcggcggggacgaggaggccatccggccccagatgcagcagatcttggactttgagacggcactggccaacatcaccatcccacaggagaagcgccgtgatgaggagctcatctaccacaaagtgacggcagccgagctgcagaccttggcacccgccatcaactggttgccttttctcaacaccatcttctaccccgtggagatcaatgaatccgagcctattgtggtctatgacaaggaataccttgagcagatctccactctcatcaacaccaccgacagatgcctgctcaacaactacatgatctggaacctggtgcggaaaacaagctccttccttgaccagcgctttcaggacgccgatgagaagttcatggaagtcatgtacgggaccaagaagacctgtcttcctcgctggaagttttgcgtgagtgacacagaaaacaacctgggctttgcgttgggccccatgtttgtcaaagcaaccttcgccgaggacagcaagagcatagccaccgagatcatcctggagattaagaaggcatttgaggaaagcctgagcaccctgaagtggatggatgaggaaacccgaaaatcagccaaggaaaaggccgatgccatctacaacatgataggataccccaacttcatcatggatcccaaggagctggacaaagtgtttaatgactacactgcagttccagacctctactttgaaaatgccatgcggtttttcaacttctcatggagggtcactgccgatcagctcaggaaagcccccaacagagatcagtggagcatgaccccgcccatggtgaacgcctactactcgcccaccaagaatgagattgtgtttccggccgggatcctgcaggcaccattctacacacgctcctcacccaaggccttaaactttggtggcataggtgtcgtcgtgggccatgagctgactcatgcttttgatgatcaaggacgggagtatgacaaggacgggaacctccggccatggtggaagaactcatccgtggaggccttcaagcgtcagaccgagtgcatggtagagcagtacagcaactacagcgtgaacggggagccggtgaacgggcggcacaccctgggggagaacatcgccgacaacgggggtctcaaggcggcctatcgggcttaccagaactgggtgaagaagaacggggctgagcactcgctccccaccctgggcctcaccaataaccagctcttcttcctgggctttgcacaggtctggtgctccgtccgcacacctgagagctcccacgaaggcctcatcaccgatccccacagcccctctcgcttccgggtcatcggctccctctccaattccaaggagttctcagaacacttccgctgcccacctggctcacccatgaacccgcctcacaagtgcgaagtctggtaaggacgaagcggagagagccaagacggaggaggggaaggggctgaggacgagacccccatccagcctccagggcattgctcagcccgcttggccacccggggccctgcttcctcacactggcgggttttcagccggaaccgagcccatggtgttggctctcaacgtgacccgcagtctgatcccctgtgaagagccggacatcccaggcacacgtgtgcgccaccttcagcaggcattcgggtgctgggctggtggctcatcaggcctgggccccacactgacaagcgccagatacgccacaaataccactgtgtcaaatgctttcaagatatatttttggggaaactattttttaaacactgtggaatacactggaaatcttcagggaaaaacacatttaaacacttttttttttaaggaaagaattggtatatttattatgttctgtttttctaaataacctgtggacaagggaagccccactgatttactccctctcttccccactccctgtgaggctgggctgaggcacggatccctgggccacagagcaagtctccaaatcagacagctgcctcagcccctgggatgtgtgatttcagctcctgtcacctcatgcaagggcgtggagaccagtagaggtgtggaggccaggcagagagaggagcctgctctgcggggggcccagctcatgggcactgccccttcagctagcctgcctccgtcccctgagtccaacagtgggagccctagctgggaagttctgatccccaaagccacagcaggggactgatggctatagcagaatgaggtcgggtcaggaccctcaaacaccatctgggaacaccaagcaccctgaatcgagactgcaggagccctgcggggtgagactgtgtcagagatacactgctggccacaagtgtcccctctcagtcccaccttttcgggctgtcccatgtctatctcaggggcccgttacctctctgcagcagtcccccatcccagccacaccagggtctgtccggccaaccctcttccccagggaaaggagaaaagagaaaacaggctgggcccggtggctcactcctgtaatcccagcactttgggaggttgaggtgggcggatcacctgaggtcaggagtttgagaccagcctggccaacgtggtgaaaccccatctctactaaaaaaaattacaaaaattagccgggagtggtggtgggcacctgtaatcccagttactcgggaggctgaggcaagagaatctcttgagctcaggaggcagaggttgcagtgagctgagattgcgccactgcactccagcctgggtgacagagggagactccgtcccaaaaaaaagaaaagagaaacagctgtcacctcccgcaggacccaaatcctctctctgagcaccgtcatccaccacatggctgggcctggctcccaggaccagtccagtcctctagtgccttatctgaggctgcagccgccagtctccaccccaaggagacagcccctgctcctagatgcccttggcctccgcagtgcagcccccaggtgtcctgactgaagcacaggccatagccccatttccccggtgcctgcagggctaacctccacgggagcccaggagctctggccggcaggtccatggcacagggcatcggaagactgcaaaactgctggacttaccctgggctgcagtccattgtcggcccctgggttgaatcaagatagtacttgcagctagatggatgcttttagccaggggacattgtgaggggaagattcctccacccagtctggcctgtggtgtctgtctcctcc

SEQ ID NO: 677 - DNA, 4282 bp, Homo sapiens
cctggattagggctgaatctgtgggaaccagaccacccctgagacaggaggcagccctgatgcctctccagggcctgggcctgcagcggaaccccttcctccaagggaagcggggcccggggctcacgtcttccccgcccctcctgcctccttccctgcaggtgaacttccacagcccccggagtggccagaggtgctgggctgcacggacccaggtggagaagcggctggtggtgttggtggtacttctggcggcaggactggtggcctgcttggcagcactgggcatccagtaccagacaagatccccctctgtgtgcctgagcgaagcttgtgtctcagtgaccagctccatcttgagctccatggaccccacagtggacccctgccatgacttcttcagctacgcctgtgggggctggatcaaggccaacccagtccctgatggccactcacgctgggggaccttcagcaacctctgggaacacaaccaagcaatcatcaagcacctcctcgaaaactccacggccagcgtgagcgaggcagagagaaaggcgcaagtatactaccgtgcgtgcatgaacgagaccaggatcgaggagctcagggccaaacctctaatggagttgattgagaggctcgggggctggaacatcacaggtccctgggccaaggacaacttccaggacaccctgcaggtggtcaccgcccactaccgcacctcacccttcttctctgtctatgtcagtgccgattccaagaactccaacagcaacgtgatccaggtggaccagtctggcctgggcttgccctcgagagactattacctgaacaaaactgaaaacgagaaggtgctgaccggatatctgaactacatggtccagctggggaagctgctgggcggcggggacgaggaggccatccggccccagatgcagcagatcttggactttgagacggcactggccaacatcaccatcccacaggagaagcgccgtgatgaggagctcatctaccacaaagtgacggcagccgagctgcagaccttggcacccgccatcaactggttgccttttctcaacaccatcttctaccccgtggagatcaatgaatccgagcctattgtggtctatgacaaggaataccttgagcagatctccactctcatcaacaccaccgacagatgcctgctcaacaactacatgatctggaacctggtgcggaaaacaagctccttccttgaccagcgctttcaggacgccgatgagaagttcatggaagtcatgtacgggaccaagaagacctgtcttcctcgctggaagttttgcgtgagtgacacagaaaacaacctgggctttgcgttgggccccatgtttgtcaaagcaaccttcgccgaggacagcaagagcatagccaccgagatcatcctggagattaagaaggcatttgaggaaagcctgagcaccctgaagtggatggatgaggaaacccgaaaatcagccaaggaaaaggccgatgccatctacaacatgataggataccccaacttcatcatggatcccaaggagctggacaaagtgtttaatgactacactgcagttccagacctctactttgaaaatgccatgcggtttttcaacttctcatggagggtcactgccgatcagctcaggaaagcccccaacagagatcagtggagcatgaccccgcccatggtgaacgcctactactcgcccaccaagaatgagattgtgtttccggccgggatcctgcaggcaccattctacacacgctcctcacccaaggccttaaactttggtggcataggtgtcgtcgtgggccatgagctgactcatgcttttgatgatcaaggacgggagtatgacaaggacgggaacctccggccatggtggaagaactcatccgtggaggccttcaagcgtcagaccgagtgcatggtagagcagtacagcaactacagcgtgaacggggagccggtgaacgggcggcacaccctgggggagaacatcgccgacaacgggggtctcaaggcggcctatcgggcttaccagaactgggtgaagaagaacggggctgagcactcgctccccaccctgggcctcaccaataaccagctcttcttcctgggctttgcacaggtctggtgctccgtccgcacacctgagagctcccacgaaggcctcatcaccgatccccacagcccctctcgcttccgggtcatcggctccctctccaattccaaggagttctcagaacacttccgctgcccacctggctcacccatgaacccgcctcacaagtgcgaagtctggtaaggacgaagcggagagagccaagacggaggaggggaaggggctgaggacgagacccccatccagcctccagggcattgctcagcccgcttggccacccggggccctgcttcctcacactggcgggttttcagccggaaccgagcccatggtgttggctctcaacgtgacccgcagtctgatcccctgtgaagagccggacatcccaggcacacgtgtgcgccaccttcagcaggcattcgggtgctgggctggtggctcatcaggcctgggccccacactgacaagcgccagatacgccacaaataccactgtgtcaaatgctttcaagatatatttttggggaaactattttttaaacactgtggaatacactggaaatcttcagggaaaaacacatttaaacacttttttttttaaggaaagaattggtatatttattatgttctgtttttctaaataacctgtggacaagggaagccccactgatttactccctctcttccccactccctgtgaggctgggctgaggcacggatccctgggccacagagcaagtctccaaatcagacagctgcctcagcccctgggatgtgtgatttcagctcctgtcacctcatgcaagggcgtggagaccagtagaggtgtggaggccaggcagagagaggagcctgctctgcggggggcccagctcatgggcactgccccttcagctagcctgcctccgtcccctgagtccaacagtgggagccctagctgggaagttctgatccccaaagccacagcaggggactgatggctatagcagaatgaggtcgggtcaggaccctcaaacaccatctgggaacaccaagcaccctgaatcgagactgcaggagccctgcggggtgagactgtgtcagagatacactgctggccacaagtgtcccctctcagtcccaccttttcgggctgtcccatgtctatctcaggggcccgttacctctctgcagcagtcccccatcccagccacaccagggtctgtccggccaaccctcttccccagggaaaggagaaaagagttgaggtgggcggatcacctgaggtcaggagtttgagaccagcctggccaacgtggtgaaaccccatctctactaaaaaaaattacaaaaattagccgggagtggtggtgggcacctgtaatcccagttactcgggaggctgaggcaagagaatctcttgagctcaggaggcagaggttgcagtgagctgagattgcgccactgcactccagcctgggtgacagagggagactccgtcccaaaaaaaagaaaagagaaacagctgtcacctcccgcaggacccaaatcctctctctgagcaccgtcatccaccacatggctgggcctggctcccaggaccagtccagtcctctagtgccttatctgaggctgcagccgccagtctccaccccaaggagacagcccctgctcctagatgcccttggcctccgcagtgcagcccccaggtgtcctgactgaagcacaggccatagccccatttccccggtgcctgcagggctaacctccacgggagcccaggagctctggccggcaggtccatggcacagggcatcggaagactgcaaaactgctggacttaccctgggctgcagtccattgtcggcccctgggttgaatcaagatagtacttgcagctagatggatgcttttagccaggggacattgtgaggggaagattcctccacccagtctggcctgtggtgtctgtctcctccctggaatcctcctgcccgagaggaagcagacggcacagggacacccctgccaccttgggatctgcctccaagctggtgcagggtatcgagagtggattccagatggaggtcctggtcccagcacgcagcagtcctggtagctctgcagaggagacaggaacccgagaagtag

SEQ ID NO: 678 - DNA, 4337 bp, Homo sapiens
gagcgcgccgcctgggccaggcagccgagccgtccgagcagctgggctgggagcagggaacccggagctgggaatcgggagccgggcgcggggagctgcgcgaagccggggcggagcacgcgagctatgatgtcgacgtacaagcgggccacgctggacgaggaggacctggtggactcgctctccgagggcgacgcataccccaacggcctgcaggtgaacttccacagcccccggagtggccagaggtgctgggctgcacggacccaggtggagaagcggctggtggtgttggtggtacttctggcggcaggactggtggcctgcttggcagcactgggcatccagtaccagacaagatccccctctgtgtgcctgagcgaagcttgtgtctcagtgaccagctccatcttgagctccatggaccccacagtggacccctgccatgacttcttcagctacgcctgtgggggctggatcaaggccaacccagtccctgatggccactcacgctgggggaccttcagcaacctctgggaacacaaccaagcaatcatcaagcacctcctcgaaaactccacggccagcgtgagcgaggcagagagaaaggcgcaagtatactaccgtgcgtgcatgaacgagaccaggatcgaggagctcagggccaaacctctaatggagttgattgagaggctcgggggctggaacatcacaggtccctgggccaaggacaacttccaggacaccctgcaggtggtcaccgcccactaccgcacctcacccttcttctctgtctatgtcagtgccgattccaagaactccaacagcaacgtgatccaggtggaccagtctggcctgggcttgccctcgagagactattacctgaacaaaactgaaaacgagaaggtgctgaccggatatctgaactacatggtccagctggggaagctgctgggcggcggggacgaggaggccatccggccccagatgcagcagatcttggactttgagacggcactggccaacatcaccatcccacaggagaagcgccgtgatgaggagctcatctaccacaaagtgacggcagccgagctgcagaccttggcacccgccatcaactggttgccttttctcaacaccatcttctaccccgtggagatcaatgaatccgagcctattgtggtctatgacaaggaataccttgagcagatctccactctcatcaacaccaccgacagatgcctgctcaacaactacatgatctggaacctggtgcggaaaacaagctccttccttgaccagcgctttcaggacgccgatgagaagttcatggaagtcatgtacgggaccaagaagacctgtcttcctcgctggaagttttgcgtgagtgacacagaaaacaacctgggctttgcgttgggccccatgtttgtcaaagcaaccttcgccgaggacagcaagagcatagccaccgagatcatcctggagattaagaaggcatttgaggaaagcctgagcaccctgaagtggatggatgaggaaacccgaaaatcagccaaggaaaaggccgatgccatctacaacatgataggataccccaacttcatcatggatcccaaggagctggacaaagtgtttaatgactacactgcagttccagacctctactttgaaaatgccatgcggtttttcaacttctcatggagggtcactgccgatcagctcaggaaagcccccaacagagatcagtggagcatgaccccgcccatggtgaacgcctactactcgcccaccaagaatgagattgtgtttccggccgggatcctgcaggcaccattctacacacgctcctcacccaaggccttaaactttggtggcataggtgtcgtcgtgggccatgagctgactcatgcttttgatgatcaaggacgggagtatgacaaggacgggaacctccggccatggtggaagaactcatccgtggaggccttcaagcgtcagaccgagtgcatggtagagcagtacagcaactacagcgtgaacggggagccggtgaacgggcggcacaccctgggggagaacatcgccgacaacgggggtctcaaggcggcctatcgggcttaccagaactgggtgaagaagaacggggctgagcactcgctccccaccctgggcctcaccaataaccagctcttcttcctgggctttgcacaggtctggtgctccgtccgcacacctgagagctcccacgaaggcctcatcaccgatccccacagcccctctcgcttccgggtcatcggctccctctccaattccaaggagttctcagaacacttccgctgcccacctggctcacccatgaacccgcctcacaagtgcgaagtctggtaaggacgaagcggagagagccaagacggaggaggggaaggggctgaggacgagacccccatccagcctccagggcattgctcagcccgcttggccacccggggccctgcttcctcacactggcgggttttcagccggaaccgagcccatggtgttggctctcaacgtgacccgcagtctgatcccctgtgaagagccggacatcccaggcacacgtgtgcgccaccttcagcaggcattcgggtgctgggctggtggctcatcaggcctgggccccacactgacaagcgccagatacgccacaaataccactgtgtcaaatgctttcaagatatatttttggggaaactattttttaaacactgtggaatacactggaaatcttcagggaaaaacacatttaaacacttttttttttaaggaaagaattggtatatttattatgttctgtttttctaaataacctgtggacaagggaagccccactgatttactccctctcttccccactccctgtgaggctgggctgaggcacggatccctgggccacagagcaagtctccaaatcagacagctgcctcagcccctgggatgtgtgatttcagctcctgtcacctcatgcaagggcgtggagaccagtagaggtgtggaggccaggcagagagaggagcctgctctgcggggggcccagctcatgggcactgccccttcagctagcctgcctccgtcccctgagtccaacagtgggagccctagctgggaagttctgatccccaaagccacagcaggggactgatggctatagcagaatgaggtcgggtcaggaccctcaaacaccatctgggaacaccaagcaccctgaatcgagactgcaggagccctgcggggtgagactgtgtcagagatacactgctggccacaagtgtcccctctcagtcccaccttttcgggctgtcccatgtctatctcaggggcccgttacctctctgcagcagtcccccatcccagccacaccagggtctgtccggccaaccctcttccccagggaaaggagaaaagagttgaggtgggcggatcacctgaggtcaggagtttgagaccagcctggccaacgtggtgaaaccccatctctactaaaaaaaattacaaaaattagccgggagtggtggtgggcacctgtaatcccagttactcgggaggctgaggcaagagaatctcttgagctcaggaggcagaggttgcagtgagctgagattgcgccactgcactccagcctgggtgacagagggagactccgtcccaaaaaaaagaaaagagaaacagctgtcacctcccgcaggacccaaatcctctctctgagcaccgtcatccaccacatggctgggcctggctcccaggaccagtccagtcctctagtgccttatctgaggctgcagccgccagtctccaccccaaggagacagcccctgctcctagatgcccttggcctccgcagtgcagcccccaggtgtcctgactgaagcacaggccatagccccatttccccggtgcctgcagggctaacctccacgggagcccaggagctctggccggcaggtccatggcacagggcatcggaagactgcaaaactgctggacttaccctgggctgcagtccattgtcggcccctgggttgaatcaagatagtacttgcagctagatggatgcttttagccaggggacattgtgaggggaagattcctccacccagtctggcctgtggtgtctgtctcctccctggaatcctcctgcccgagaggaagcagacggcacagggacacccctgccaccttgggatctgcctccaagctggtgcagggtatcgagagtggattccagatggaggtcctggtcccagcacgcagcagtcctggtagctctgcagaggagacaggaacccgagaagtag

SEQ ID NO: 679 - DNA, 4169 bp, Homo sapiens
tcgggcgcgagagccatggaggcgctgagggagtccgtgctgcatttggccttgcagatgtcgacgtacaagcgggccacgctggacgaggaggacctggtggactcgctctccgagggcgacgcataccccaacggcctgcaggtgaacttccacagcccccggagtggccagaggtgctgggctgcacggacccaggtggagaagcggctggtggtgttggtggtacttctggcggcaggactggtggcctgcttggcagcactgggcatccagtaccagacaagatccccctctgtgtgcctgagcgaagcttgtgtctcagtgaccagctccatcttgagctccatggaccccacagtggacccctgccatgacttcttcagctacgcctgtgggggctggatcaaggccaacccagtccctgatggccactcacgctgggggaccttcagcaacctctgggaacacaaccaagcaatcatcaagcacctcctcgaaaactccacggccagcgtgagcgaggcagagagaaaggcgcaagtatactaccgtgcgtgcatgaacgagaccaggatcgaggagctcagggccaaacctctaatggagttgattgagaggctcgggggctggaacatcacaggtccctgggccaaggacaacttccaggacaccctgcaggtggtcaccgcccactaccgcacctcacccttcttctctgtctatgtcagtgccgattccaagaactccaacagcaacgtgatccaggtggaccagtctggcctgggcttgccctcgagagactattacctgaacaaaactgaaaacgagaaggtgctgaccggatatctgaactacatggtccagctggggaagctgctgggcggcggggacgaggaggccatccggccccagatgcagcagatcttggactttgagacggcactggccaacatcaccatcccacaggagaagcgccgtgatgaggagctcatctaccacaaagtgacggcagccgagctgcagaccttggcacccgccatcaactggttgccttttctcaacaccatcttctaccccgtggagatcaatgaatccgagcctattgtggtctatgacaaggaataccttgagcagatctccactctcatcaacaccaccgacagatgcctgctcaacaactacatgatctggaacctggtgcggaaaacaagctccttccttgaccagcgctttcaggacgccgatgagaagttcatggaagtcatgtacgggaccaagaagacctgtcttcctcgctggaagttttgcgtgagtgacacagaaaacaacctgggctttgcgttgggccccatgtttgtcaaagcaaccttcgccgaggacagcaagagcatagccaccgagatcatcctggagattaagaaggcatttgaggaaagcctgagcaccctgaagtggatggatgaggaaacccgaaaatcagccaaggaaaaggccgatgccatctacaacatgataggataccccaacttcatcatggatcccaaggagctggacaaagtgtttaatgactacactgcagttccagacctctactttgaaaatgccatgcggtttttcaacttctcatggagggtcactgccgatcagctcaggaaagcccccaacagagatcagtggagcatgaccccgcccatggtgaacgcctactactcgcccaccaagaatgagattgtgtttccggccgggatcctgcaggcaccattctacacacgctcctcacccaaggccttaaactttggtggcataggtgtcgtcgtgggccatgagctgactcatgcttttgatgatcaaggacgggagtatgacaaggacgggaacctccggccatggtggaagaactcatccgtggaggccttcaagcgtcagaccgagtgcatggtagagcagtacagcaactacagcgtgaacggggagccggtgaacgggcggcacaccctgggggagaacatcgccgacaacgggggtctcaaggcggcctatcgggtctggtgctccgtccgcacacctgagagctcccacgaaggcctcatcaccgatccccacagcccctctcgcttccgggtcatcggctccctctccaattccaaggagttctcagaacacttccgctgcccacctggctcacccatgaacccgcctcacaagtgcgaagtctggtaaggacgaagcggagagagccaagacggaggaggggaaggggctgaggacgagacccccatccagcctccagggcattgctcagcccgcttggccacccggggccctgcttcctcacactggcgggttttcagccggaaccgagcccatggtgttggctctcaacgtgacccgcagtctgatcccctgtgaagagccggacatcccaggcacacgtgtgcgccaccttcagcaggcattcgggtgctgggctggtggctcatcaggcctgggccccacactgacaagcgccagatacgccacaaataccactgtgtcaaatgctttcaagatatatttttggggaaactattttttaaacactgtggaatacactggaaatcttcagggaaaaacacatttaaacacttttttttttaaggaaagaattggtatatttattatgttctgtttttctaaataacctgtggacaagggaagccccactgatttactccctctcttccccactccctgtgaggctgggctgaggcacggatccctgggccacagagcaagtctccaaatcagacagctgcctcagcccctgggatgtgtgatttcagctcctgtcacctcatgcaagggcgtggagaccagtagaggtgtggaggccaggcagagagaggagcctgctctgcggggggcccagctcatgggcactgccccttcagctagcctgcctccgtcccctgagtccaacagtgggagccctagctgggaagttctgatccccaaagccacagcaggggactgatggctatagcagaatgaggtcgggtcaggaccctcaaacaccatctgggaacaccaagcaccctgaatcgagactgcaggagccctgcggggtgagactgtgtcagagatacactgctggccacaagtgtcccctctcagtcccaccttttcgggctgtcccatgtctatctcaggggcccgttacctctctgcagcagtcccccatcccagccacaccagggtctgtccggccaaccctcttccccagggaaaggagaaaagagttgaggtgggcggatcacctgaggtcaggagtttgagaccagcctggccaacgtggtgaaaccccatctctactaaaaaaaattacaaaaattagccgggagtggtggtgggcacctgtaatcccagttactcgggaggctgaggcaagagaatctcttgagctcaggaggcagaggttgcagtgagctgagattgcgccactgcactccagcctgggtgacagagggagactccgtcccaaaaaaaagaaaagagaaacagctgtcacctcccgcaggacccaaatcctctctctgagcaccgtcatccaccacatggctgggcctggctcccaggaccagtccagtcctctagtgccttatctgaggctgcagccgccagtctccaccccaaggagacagcccctgctcctagatgcccttggcctccgcagtgcagcccccaggtgtcctgactgaagcacaggccatagccccatttccccggtgcctgcagggctaacctccacgggagcccaggagctctggccggcaggtccatggcacagggcatcggaagactgcaaaactgctggacttaccctgggctgcagtccattgtcggcccctgggttgaatcaagatagtacttgcagctagatggatgcttttagccaggggacattgtgaggggaagattcctccacccagtctggcctgtggtgtctgtctcctccctggaatcctcctgcccgagaggaagcagacggcacagggacacccctgccaccttgggatctgcctccaagctggtgcagggtatcgagagtggattccagatggaggtcctggtcccagcacgcagcagtcctggtagctctgcagaggagacaggaacccgagaagtag

SEQ ID NO: 680 - DNA, 1014 bp, Homo sapiens
cccgtagaagattccagcaccctcccctaactccaggccagactcctttcagctaaaggggagatctggatggcatctacttcgtatgactattgcagagtgcccatggaagacggggataagcgctgtaagcttctgctggggataggaattctggtgctcctgatcatcgtgattctgggggtgcccttgattatcttcaccatcaaggccaacagcgaggcctgccgggacggccttcgggcagtgatggagtgtcgcaatgtcacccatctcctgcaacaagagctgaccgaggcccagaagggctttcaggatgtggaggcccaggccgccacctgcaaccacactgtgatggccctaatggcttccctggatgcagagaaggcccaaggacaaaagaaagtggaggagcttgagggagagatcactacattaaaccataagcttcaggacgcgtctgcagaggtggagcgactgagaagagaaaaccaggtcttaagcgtgagaatcgcggacaagaagtactaccccagctcccaggactccagctccgctgcggcgccccagctgctgattgtgctgctgggcctcagcgctctgctgcagtgagatcccaggaagctggcacatcttggaaggtccgtcctgctcggcttttcgcttgaacattcccttgatctcatcagttctgagcgggtcatggggcaacacggttagcggggagagcacggggtagccggagaagggcctctggagcaggtctggaggggccatggggcagtcctgggtgtggggacacagtcgggttgacccagggctgtctccctccagagcctccctccggacaatgagtcccccctcttgtctcccaccctgagattgggcatggggtgcggtgtggggggcatgtgctgcctgttgttatgggttttttttgcggggggggttgcttttttctggggtctttgagctccaaaaaataaacacttcctttgagggagagcacacctg

SEQ ID NO: 681 - DNA, 950 bp, Homo sapiens
cccgtagaagattccagcaccctcccctaactccaggccagactcctttcagctaaaggggagatctggatggcatctacttcgtatgactattgcagagtgcccatggaagacggggataagcgctgtaagcttctgctggggataggaattctggtgctcctgatcatcgtgattctgggggtgcccttgattatcttcaccatcaaggccaacagcgaggcctgccgggacggccttcgggcagtgatggagtgtcgcaatgtcacccatctcctgcaacaagagctgaccgaggcccagaagggctttcaggatgtggaggcccaggccgccacctgcaaccacactgtgatggccctaatggcttccctggatgcagagaaggcccaaggacaaaagaaagtggaggagcttgagggagagatcactacattaaaccataagcttcaggacgcgtctgcagaggtggagcgactgagaagagaaaaccaggtcttaagcgtgagaatcgcggacaagaagtactaccccagctcccaggactccagctccgctgcggcgccccagctgctgattgtgctgctgggcctcagcgctctgctgcagtgagatcccaggaagctggcacatcttggaaggtccgtcctgctcggcttttcgcttgaacattcccttgatctcatcagttctgagcgggtctggaggggccatggggcagtcctgggtgtggggacacagtcgggttgacccagggctgtctccctccagagcctccctccggacaatgagtcccccctcttgtctcccaccctgagattgggcatggggtgcggtgtggggggcatgtgctgcctgttgttatgggttttttttgcggggggggttgcttttttctggggtctttgagctccaaaaaataaacacttcctttgagggagagcacacct

SEQ ID NO: 682 - DNA, 973 bp, Homo sapiens
atagctgaagaacaactgcaagttgaattgttcgtgaaggctggcagtgatggggccaagattgggaactgccccttctagagactgttcatggtgctgtggctcaagggagtcaccttcaatgtcaccatcattgacaccaagaggcagaccaagatagtgcaaaagctgtgcccaggagggcagctcccattcctgctgtatggcatggaagaacacaaggacaccaacaagattgaggaatttctgtaggcagtgctgtgccctcctaggtaccccaagctggcagctctgaaccctgaatccaacacagctgagcaggacatatttgccaaattttctgcttacatcaagaattcaaacccagtagtcaatgacaatctggagaagggactcctgaaagccctgaaggttttagacaatcacttgatatcctgccactcagaagaagtggatgaaaccagtgctgaagatgaaggcatctctcagaggaagtttctggatggcaatgagctcaccctggctgactgcaacctgttgctaacgctccacatagtacaagtggtgtgtaagaaaaaaaaaaaataccagggattcaccatccctgaggccttccagggcgtgcagcagtacttgagcaatgcctatgctcaggaagaatctgcctccacctgtccagatgatgagatcaagctcacctatgagcaaggatccaaggccctccaataagcccctcttgggactccttcagccccctccattttctccacaaaggccctggtggtttccacattgctacccaaaggacacactccagaatggccagtgggcagggaatcctggagcacttgtcccgggatggtgtggtggaagaggggataagggaaagaaatagggagcctggatgagatttttactgtggggtgggatgggtaggacaacatatttcagtagtaaaatacagaataaaatt

SEQ ID NO: 683 - DNA, 1251 bp, Homo sapiens
gttcagggcggggccggtcggtgagtcagcggctctctgatccagcccgggagaggaccgagctggaggagctgggtgtggggtgcgttgggctggtggggaggcctagtttgggtgcaagtaggtctgattgagcttgtgttgtgctgaagggacagccctgggtctaggggagagagtccctgagtgtgagacccgccttccccggtcccagcccctcccagttcccccagggacggccacttcctggtccccgacgcaaccatggctgaagaacaaccgcaggtcgaattgttcgtgaaggctggcagtgatggggccaagattgggaactgcccattctcccagagactgttcatggtactgtggctcaagggagtcaccttcaatgttaccaccgttgacaccaaaaggcggaccgagacagtgcagaagctgtgcccaggggggcagctcccattcctgctgtatggcactgaagtgcacacagacaccaacaagattgaggaatttctggaggcagtgctgtgccctcccaggtaccccaagctggcagctctgaaccctgagtccaacacagctgggctggacatatttgccaaattttctgcctacatcaagaattcaaacccagcactcaatgacaatctggagaagggactcctgaaagccctgaaggttttagacaattacttaacatcccccctcccagaagaagtggatgaaaccagtgctgaagatgaaggtgtctctcagaggaagtttttggatggcaacgagctcaccctggctgactgcaacctgttgccaaagttacacatagtacaggtggtgtgtaagaagtaccggggattcaccatccccgaggccttccggggagtgcatcggtacttgagcaatgcctacgcccgggaagaattcgcttccacctgtccagatgatgaggagatcgagctcgcctatgagcaagtggcaaaggccctcaaataagcccctcctgggactccctcaaccccctccattttctccacaaaggccctggtggtttccacattgctacccaatggacacactccaaaatggccagtgggcagggaatcctggagcacttgttccgggatggtgtggtggaagaggggatgagggaaagaaatggggggcctgggtcagatttttattgtggggtgggatgagtaggacaacatatttcagtaataaaatacagaataaaaatcaagtgtttttacgcaa

SEQ ID NO: 684 - DNA, 2718 bp, Homo sapiens
ccccagcgcgggagaaacgttctcactcgctctctgctcgctgcgggcgctccccgccctctgctgccagaaccttggggatgtgcctagacccggcgcagcacacgtccgggccaaccgcgagcagaacaaacctttggcgggcggccaggaggctccctcccagccaccgcccccctccagcgcctttttttccccccatacaatacaagatcttccttcctcagttcccttaaagcacagcccagggaaacctcctcacagttttcatccagccacgggccagcatgtctgggggcaaatacgtagactcggagggacatctctacaccgttcccatccgggaacagggcaacatctacaagcccaacaacaaggccatggcagacgagctgagcgagaagcaagtgtacgacgcgcacaccaaggagatcgacctggtcaaccgcgaccctaaacacctcaacgatgacgtggtcaagattgactttgaagatgtgattgcagaaccagaagggacacacagttttgacggcatttggaaggccagcttcaccaccttcactgtgacgaaatactggttttaccgcttgctgtctgccctctttggcatcccgatggcactcatctggggcatttacttcgccattctctctttcctgcacatctgggcagttgtaccatgcattaagagcttcctgattgagattcagtgcatcagccgtgtctattccatctacgtccacaccgtctgtgacccactctttgaagctgttgggaaaatattcagcaatgtccgcatcaacttgcagaaagaaatataaatgacatttcaaggatagaagtatacctgattttttttccttttaattttcctggtgccaatttcaagttccaagttgctaatacagcaacaatttatgaattgaattatcttggttgaaaataaaaagatcactttctcagttttcataagtattatgtctcttctgagctatttcatctatttttggcagtctgaatttttaaaacccatttaaatttttttccttacctttttatttgcatgtggatcaaccatcgctttattggctgagatatgaacatattgttgaaaggtaatttgagagaaatatgaagaactgaggaggaaaaaaaaaaaaaagaaaagaaccaacaacctcaactgcctactccaaaatgttggtcattttatgttaagggaagaattccagggtatggccatggagtgtacaagtatgtgggcagattttcagcaaactcttttcccactgtttaaggagttagtggattactgccattcacttcataatccagtaggatccagtgatccttacaagttagaaaacataatcttctgccttctcatgatccaactaatgccttactcttcttgaaattttaacctatgatattttctgtgcctgaatatttgttatgtagataacaagacctcagtgccttcctgtttttcacattttccttttcaaatagggtctaactcagcaactcgctttaggtcagcagcctccctgaagaccaaaattagaatatccatgacctagttttccatgcgtgtttctgactctgagctacagagtctggtgaagctcacttctgggcttcatctggcaacatctttatccgtagtgggtatggttgacactagcccaatgaaatgaattaaagtggaccaatagggctgagctctctgtgggctggcagtcctggaagccagctttccctgcctctcatcaactgaatgaggtcagcatgtctattcagcttcgtttattttcaagaataatcacgctttcctgaatccaaactaatccatcaccggggtggtttagtggctcaacattgtgttcccatttcagctgatcagtgggcctccaaggaggggctgtaaaatggaggccattgtgtgagcctatcagagttgctgcaaacctgacccctgctcagtaaagcacttgcaaccgtctgttatgctgtgacacatggcccctccccctgccaggagctttggacctaatccaagcatccctttgcccagaaagaagatgggggaggaggcagtaataaaaagattgaagtattttgctggaataagttcaaattcttctgaactcaaactgaggaatttcacctgtaaacctgagtcgtacagaaagctgcctggtatatccaaaagctttttattcctcctgctcatattgtgattctgcctttggggacttttcttaaaccttcagttatgatttttttttcatacacttattggaactctgcttgatttttgcctcttccagtcttcctgacactttaattaccaacctgttacctactttgactttttgcatttaaaacagacactggcatggatatagttttacttttaaactgtgtacataactgaaaatgtgctatactgcatactttttaaatgtaaagatatttttatctttatatgaagaaaatcacttaggaaatggctttgtgattcaatctgtaaactgtgtattccaagacatgtctgttctacatagatgcttagtccctcatgcaaatcaattactggtccaaaagattgctgaaattttatatgcttactgatatattttacaattttttatcatgcatgtcctgtaaaggttacaagcctgcacaataaaaatgtttaacggttaaaca

SEQ ID NO: 685 - DNA, 3178 bp, Homo sapiens
cctcctcacagttttcatccagccacgggccagcatgtctgggggcaaatacgtagactcggaggtaggcatccgtgggggggcgccggctcgggcgtgcggggagtgtccgcttctgctatctgcctctccaaatatcccgactgctgccctggccccagccctctctccacttcggagcactcctctggcgttggcaccgctgaggaatgggcctgggcggggaggtgaagagaagccaggaatgttttatgttttcctaatggagagggggcctcgggagcccctgagctaggaggacacggaaaaggggattggggtcctgagattgggtctgttgggcccaggacgcgttttctggatgggtctaggatgctcccctgtcgcgggacccccgcggtccggccctgcctgctgggggttcgaagaggtggagtgcagggtggaggtgttatttacccgagtcctggggacagtccccgggactctccgccaggcgcccagaccggcaggtcccgcaggcggcgcgcggtgtgtttgcactttccaaagttcttgaaccatctcaagaactccttctgcatcttggcgtctggcaggggtgttccgagagaggtagacctcccctccccaaactgccaccatcacttccaacgccctccacgcgctggagctctgcccgggtgtggaaacctcgtcttccaacacgtagctgcccttcagccacccgcccgcagcctgggagtgccctgagggtgggtcgggggagctgcgcagggacatctctacaccgttcccatccgggaacagggcaacatctacaagcccaacaacaaggccatggcagacgagctgagcgagaagcaagtgtacgacgcgcacaccaaggagatcgacctggtcaaccgcgaccctaaacacctcaacgatgacgtggtcaagattgactttgaagatgtgattgcagaaccagaagggacacacagttttgacggcatttggaaggccagcttcaccaccttcactgtgacgaaatactggttttaccgcttgctgtctgccctctttggcatcccgatggcactcatctggggcatttacttcgccattctctctttcctgcacatctgggcagttgtaccatgcattaagagcttcctgattgagattcagtgcatcagccgtgtctattccatctacgtccacaccgtctgtgacccactctttgaagctgttgggaaaatattcagcaatgtccgcatcaacttgcagaaagaaatataaatgacatttcaaggatagaagtatacctgattttttttccttttaattttcctggtgccaatttcaagttccaagttgctaatacagcaacaatttatgaattgaattatcttggttgaaaataaaaagatcactttctcagttttcataagtattatgtctcttctgagctatttcatctatttttggcagtctgaatttttaaaacccatttaaatttttttccttacctttttatttgcatgtggatcaaccatcgctttattggctgagatatgaacatattgttgaaaggtaatttgagagaaatatgaagaactgaggaggaaaaaaaaaaaaaagaaaagaaccaacaacctcaactgcctactccaaaatgttggtcattttatgttaagggaagaattccagggtatggccatggagtgtacaagtatgtgggcagattttcagcaaactcttttcccactgtttaaggagttagtggattactgccattcacttcataatccagtaggatccagtgatccttacaagttagaaaacataatcttctgccttctcatgatccaactaatgccttactcttcttgaaattttaacctatgatattttctgtgcctgaatatttgttatgtagataacaagacctcagtgccttcctgtttttcacattttccttttcaaatagggtctaactcagcaactcgctttaggtcagcagcctccctgaagaccaaaattagaatatccatgacctagttttccatgcgtgtttctgactctgagctacagagtctggtgaagctcacttctgggcttcatctggcaacatctttatccgtagtgggtatggttgacactagcccaatgaaatgaattaaagtggaccaatagggctgagctctctgtgggctggcagtcctggaagccagctttccctgcctctcatcaactgaatgaggtcagcatgtctattcagcttcgtttattttcaagaataatcacgctttcctgaatccaaactaatccatcaccggggtggtttagtggctcaacattgtgttcccatttcagctgatcagtgggcctccaaggaggggctgtaaaatggaggccattgtgtgagcctatcagagttgctgcaaacctgacccctgctcagtaaagcacttgcaaccgtctgttatgctgtgacacatggcccctccccctgccaggagctttggacctaatccaagcatccctttgcccagaaagaagatgggggaggaggcagtaataaaaagattgaagtattttgctggaataagttcaaattcttctgaactcaaactgaggaatttcacctgtaaacctgagtcgtacagaaagctgcctggtatatccaaaagctttttattcctcctgctcatattgtgattctgcctttggggacttttcttaaaccttcagttatgatttttttttcatacacttattggaactctgcttgatttttgcctcttccagtcttcctgacactttaattaccaacctgttacctactttgactttttgcatttaaaacagacactggcatggatatagttttacttttaaactgtgtacataactgaaaatgtgctatactgcatactttttaaatgtaaagatatttttatctttatatgaagaaaatcacttaggaaatggctttgtgattcaatctgtaaactgtgtattccaagacatgtctgttctacatagatgcttagtccctcatgcaaatcaattactggtccaaaagattgctgaaattttatatgcttactgatatattttacaattttttatcatgcatgtcctgtaaaggttacaagcctgcacaataaaaatgtttaacggttaaaca

SEQ ID NO: 686 - DNA, 2785 bp, Homo sapiens
cctcctcacagttttcatccagccacgggccagcatgtctgggggcaaatacgtagactcggaggtaggcatccgtgggggggcgccggctcgggcgtgcggggagtgtccgcttctgctatctgcctctccaaatatcccgactgctgccctggccccagccctctctccacttcggagcactcctctggcgttggcaccgctgaggaatgggcctgggcggggaggtgaagagaagccaggaatgttttatgttttcctaatggagagggggcctcgggagcccctgagctaggaggacacggaaaaggggattggggtcctgagattgggtctgttgggcccaggacgcgttttctggatgggtctaggatgctcccctgtcgcgggacccccgcggtccggccctgcctgctgggggttcgaagaggtggagtgcagggtggaggtgttatttacccgagtcctggggacagtccccgggactctccgccaggcgcccagaccggcaggtcccgcaggcggcgcgcggtgtgtttgcactttccaaagttcttgaaccatctcaagaactccttctgcatcttggcgtctggcaggggtgttccgagagaggtagacctcccctccccaaactgccaccatcacttccaacgccctccacgcgctggagctctgcccgggtgtggaaacctcgtcttccaacacgtagctgcccttcagccacccgcccgcagcctgggagtgccctgagggtgggtcgggggagctgcgcagggacatctctacaccgttcccatccgggaacagggcaacatctacaagcccaacaacaaggccatggcagacgagctgagcgagaagcaagtgtacgacgcgcacaccaaggagatcgacctggtcaaccgcgaccctaaacacctcaacgatgacgtggtcaagattgactttgaagatgtgattgcagaaccagaagggacacacagttttgacggcatttggaaggccagcttcaccaccttcactgtgacgaaatactggttttaccgcttgctgtctgccctctttggcatcccgatggcactcatctggggcatttacttcgccattctctctttcctgcacatctgggcagttgtaccatgcattaagagcttcctgattgagattcagtgcatcagccgtgtctattccatctacgtccacaccgtctgtgacccactctttgaagctgttgggaaaatattcagcaatgtccgcatcaacttgcagaaagaaatataaatgacatttcaaggatagaagtatacctgattttttttccttttaattttcctggtgccaatttcaagttccaagttgctaatacagcaacaatttatgaattgaattatcttggttgaaaataaaaagatcactttctcagttttcataagtattatgtctcttctgagctatttcatctatttttggcagtctgaatttttaaaacccatttaaatttttttccttacctttttatttgcatgtggatcaaccatcgctttattggctgagatatgaacatattgttgaaaggtaatttgagagaaatatgaagaactgaggaggaaaaaaaaaaaaaagaaaagaaccaacaacctcaactgcctactccaaaatgttggtcattttatgtgccattcacttcataatccagtaggatccagtgatccttacaagttagaaaacataatcttctggtgcctgaatatttgttatgtagataacaagacctcagtgccttcctgtttttcacattttccttttcaaatagggtctaactcagcaactcgctttaggtcagcagcctccctgaagaccaaaattagaatatccatgacctagttttccatgcgtgtttctgactctgagctacagagtctggtgaagctcacttctgggcttcatctggcaacatctttatccgtagtgggtatggttgacactagcccaatgaaatgaattaaagtggaccaatagggctgagctctctgtgggctggcagtcctggaagccagctttccctgcctctcatcaactgaatgaggtcagcatgtctattcagcttcgtttattttcaagaataatcacgctttcctgaatccaaactaatccatcaccggggtggtttagtggctcaacattgtgttcccatttcagctgatcagtgggcctccaaggaggggctgtaaaatggaggccattgtgtgagcctatcagagttgctgcaaacctgacccctgctcagtaaagcacttgcaaccgtctgttatgctgtgacacatggcccctccccctgccaggagctttggacctaatccaagcatccctttgcccagaaagaagatgggggaggaggcagtaataaaaagattgaagtattttgctggaataagttcaaattcttctgaactcaaactgaggaatttcacctgtaaacctgagtcgtacagaaagctgcctggtatatccaaaagctttttattcctcctgctcatattgtgattctgcctttggggacttttcttaaaccttcagttatgatttttttttcatacacttattggaactctgcttgatttttgcctcttccagtcttcctgacactttaattaccaacctgttacctactttgactttttgcatttaaaacagacactggcatggatatagttttacttttaaactgtgtacataactgaaaatgtgctatactgcatactttttaaatgtaaagatattt

SEQ ID NO: 687 - DNA, 7028 bp, Homo sapiens
gcgggcgggcatctctgccgaaaacacctacagcgcccgctccctcggtccttcgagcagtgatccctccgcggccaacctccccagggaaaccagcgattcgcggttcagatagcgaccttcgcccgcaggttcctgctctgccttcagacttcggcttcagtggcacctgctcagcgaggcctcgtctaaccaagccatccgaattaactacccactcactcgccatcacatcaccccgatttaattcgcagcggggcactgactttacactcgtgtgtcttctgtgtttatttatggtctgtttctggaatgtccgctcctgggactgggaccatgattttctggcgcagtgcgggtgtctcggcgtccgggatcgggcgggtcgcagtagggctccacatttgttgagtgactgaacaccgttcccggccggggagagcgccgcagccgggtccacttcaggtaggggctgggctttcccggccccgcctaggccccgcccccagcgcgaacccgctcccacctcgcctgtccacggagcagcagggggtttgactgtgcttttccctcttgcttccctcgctctttctgcagctgccacgaaaacccggaacggcggagcggcgccgcccctcgcggcacctccctggcagcccttggaggccgcgctgggcatgctcagtcagctgggccgcctcagctctcggagtaggaagctcgggcgctccggctgtaaggagccgcggcggggggaaaatggagcccttcaccaatgatcggcttcagctccccaggaatatgattgaaaacagcatgtttgaggaagaaccagatgtggtggatttagccaaagagccttgtttacatcctctagagcctgatgaggtggaatatgagccccggggttcccgactgctggtgcggggtcttggtgagcatgagatggaggaggatgaagaggattatgagtcatcagcaaagctgctgggcatgtccttcatgaatagaagctcaggccttcggaacagtgcaactggttacaggcagagcccagatggggcttgttcagtaccctctgcaaggaccatggtggtctgtgcttttgtcatcgtggttgctgtttctgtaatcatggtgatttacttactgcccagatgtacctttaccaaagaaggctgccataaaaaaaaccagtcaattggactaattcagccatttgcaacaaatgggaaattgtttccatgggcacagatcaggcttcccactgccgttgtgccactacgctatgaactcagcctacacccgaacctaacctcgatgacattcaggggttctgtgacaatttcagttcaggctcttcaggtcacatggaatatcattcttcatagcacaggtcataatatttcaagagtgacctttatgtcagcagtttcaagccaagaaaaacaagctgagatcctggaatatgcatatcatggacagatcgccattgttgcccccgaagcccttctagcagggcacaattatacgttgaagatagagtactcggcaaatatatctagttcttattatgggttttatggcttctcctacacagatgaaagtaatgagaaaaagtactttgcagcaactcagtttgaacccctggcagcaagatctgcttttccttgttttgatgaaccagcatttaaagccacttttatcatcaagatcataagggatgagcaatacaccgctttatcaaatatgcctaagaagtcatcagtcgttctagatgatggacttgttcaggatgagttttctgagagtgtgaagatgagcacttacttggttgctttcattgtgggagagatgaagaacctgagtcaggacgtaaatggaaccctggtttctatatatgctgtaccagaaaagattggtcaagttcattatgccttggaaacaactgtgaagcttcttgagttttttcaaaactactttgaaattcagtacccacttaagaaattggatttggtggctattcctgactttgaagcaggagcaatggaaaattggggtttgctcaccttccgagaggagacacttctgtatgacagtaacacttcttcaatggcggatagaaagctggtgactaaaatcattgctcatgagctggcccaccagtggtttggcaatctggtaacaatgaagtggtggaatgacctatggctaaatgaaggttttgccactttcatggagtatttctctttggaaaaaatattcaaagagctttctagttatgaagatttcttagatgctcgatttaaaaccatgaagaaagattccttaaattcatctcatccaatatcatcatctgttcagtcttcagaacaaattgaagaaatgtttgattctctttcctattttaagggatcttctctcttgttgatgttgaaaacttaccttagtgaagatgtgtttcaacatgctgttgtcctttacctgcataatcacagctatgcatctattcaaagtgatgatctgtgggatagttttaatgaggtcacaaaccaaacactagatgtaaagagaatgatgaaaacctggaccctgcagaaaggatttcctttagtgactgttcaaaagaaaggaaaggaactttttatacaacaagagagattctttttaaatatgaagcctgaaattcagccttcagatacaagctacctgtggcatattccactatcctatgtcactgaaggaagaaattattcaaaatatcaatcggtatcattactggataagaaatcaggtgtcatcaatcttacagaagaagtgctgtgggtcaaagtgaatataaacatgaatggttattatattgtacactatgcagatgatgattgggaagcactaatccatcagttgaaaataaatccttatgttctgagtgacaaagaccgagccaaccttatcaacaacatctttgaacttgcaggcctaggcaaggtacctctcaagagggcctttgatttgattaattatcttggaaatgagaaccatactgcacccatcaccgaagccctgtttcagacagacctcatctataacctccttgaaaaactgggatacatggatctggcctcaagactggtgactagggtatttaaattacttcaaaaccaaattcaacaacaaacttggactgatgagggcactccatctatgcgagagcttcggtcagccctgctagagtttgcttgcacccacaacctggggaactgctctactactgccatgaaactgtttgatgactggatggcatccaatggaactcaaagcctacctactgatgtcatgacaactgtgttcaaagttggagcaaaaactgacaaaggctggtcattccttttgggcaaatacatttctataggctctgaagcagagaagaacaaaatactagaagcacttgccagctcagaggatgtgcggaagctttactggttaatgaaaagtagcctgaatggagataacttccgaacacagaagctgtcttttatcattagaacagtgggtcgacattttcctggacacttactggcatgggattttgtcaaagagaactggaataagcttgtacagaagttccctctggggtcctataccatacaaaatattgttgctggatcaacttacctgttttcaacaaagacacatttatctgaggttcaggcattctttgaaaatcagtcagaggcaaccttccggcttcgttgtgtccaggaggctttggaagtcattcagttgaatatccagtggatggagaagaacctcaaaagtctcacatggtggctgtagcatgcacaaccgcacctcattttgttgcccattcagagagcttgtaagcttgggctctgccgcttttgcaaaagccaaggtaaagccaggatcgctgccaagttgtttgcactctttggagttctagttagctcagggcctgactgtatttttcatccatcttttctgaagtgtctttgggcagtatgtagttatttattacaaaattatattcacgtaaatgccaaccatctacaaaaacaatgagtaatttttctactttgaagatacacagatggggacaaaaaccctgttttggaattctgttctattcctcagtatccagaaagttactgacacagtaaaacaaggaaagttctaccctaagagccgccatcacttcaggccgctggtttgtcagccatctgttgcttcttattgatagatggcattggaatgtggtacaaagttagctctgaagaatatggtaacgaagacaataaagcatgcactgtaagaactgacctcaggtgtgcagatctactttgatttggggttttgattaattctttatttttctgaaaaaaagtttaaataatgtctgtaactattgtgtttttttcctgccgaatagccaggtgctacagatttttaaaatttttgttgtattgaaaagctaaacaaggccaaaaggttaaattttttgaatatttaagactttctttttcatcttttatagcgttaccataggaaactgttccaaactgagttagctttaattataattattttattcataaatggtgatagtccccagatctgtacacctttatcactccctgccgtagatatactttaggttagtatttctacattcgtggcaagcattttggtaacaccagtggttttcattgtgacttttatcactatcactaagaatgcaatttaagttgccttttggcatcatagatcatagaaactttctctctgaatcatacccatgtgtgaattttcattttatatgatagtgtagcatattagaagcatattttaaaacagagcctttgagaaattgaaaaacaattatttgaagttcaccatagtaccttaaaggaacaaagagaatgtgggataggagtaacttgaattcgtgtttagtatggtgggctttgaatttttttcactatcaaaaatagtgcttttgtttagttaaaaattgtagtttttctttttttgtgtgtccaaactaacataaaaggagtggtcaaagaaggaaagaagaaaaatgagggaggatgtccgaaactgtatggcattttactccttctgaaagagaaatactgtacttgaatttttgagctatgcagacttatacctagattgttgtgtttctttgattcttaggagaaaagctttcttcctaataattcttgagaactttatattttgtttgaaaacagtttctatgtacataaaaagggtatttacccatttgtgagcacttaaaacactccacagagtcagacagtgggaaaggtcaccctttttttattcggcaggtatcaagttagaatgtatggaattgtgaataaaattatattttattttatgaaaatatttttatataataaaatttaaaaggctggtaagctaaaaaaatagtcttctttaatcctagtgtgttttccccaatttagtcttttctaaaatttatctgttttagagtagaaaatattatatcctgagaatcacagaatcatctaaatatgtcttattcaactgaagtgattgtaagtctttattcttgtgctttggttaaatgaatgataatttagttgatagtgaaagttaatgtgtttttatatttttagagtgagggaaaaatactaaacttttgagagttttgttgtcgttgctggttttttaccatgtggtactaaattccactttgatacaaaatttaaattttgtaacttctcaaaatcacttaagattcttcagttttacctgtgcttcttgacatcgctcctataatgtatgttagttaactctgcatatggcaaatcttgtcttgaattatatcatttctctccctctctctctctctctctgtgtgtgtgtgtgtgtgtgtgtgtgtgtgtgtgtgtgtgtagtgtggggggtattgttatgagtaaaactttatcaaaacttggcctgaaaaagagataactcatgatccattgctatctttattactcaaaggctgttcattcccataataccagatccataatagttgtagtttttttgatgttgttgcccttaccttaattatttgtagttttagtaggccttgcctcagtttttcccacagaattccataattttaatgttgaactaacccatctatataggacttctaaaaactacgtcaggaatgtaaggttaaatgagaggtagaacttgtagtgtaataggtataatggtagctttcaaagttttatcttctcaaaacattgtcttagccagtgtatttctgagaactcagactgaagcacagaagtcacagtatgcttcttttatttaagcacacagattcatgacacaagtacttgttgaacaagtgttctcattgcagagagatctacttgaatataaaagggtcatcatactagattattaaaaaagaattggaaatcttgagttgtggaagaaatgtttatgctttggagatctaaaaaagttatgaatgtaggaattagataagtccagtttgttctgttaatataaaatggttagatatattaaactgcaagtagtatcagcttcaccataagcttgggccttcctccatcttgttttatttaagtctctttaaatgaaattttgttgtcattgtttcagcattcatgaactttcttactatcacaggttctactttaattttccttgccatatgtgtttccattttgtgggacattagccaccacaggaacacaagagttgtcagaagactcctgggtgtacagagcaaatcaagctgcatcagtattataggataccaaacagaatcctttctattaggaaataagaaatcagttaagtgttggctgggcgcggtggcttatgcctgtaatcccagcattttgggatgccaaggtgggcagaccatttgaggccaggagttctaaaccagtttggccaacatggcaaaaccccatctctactaa

SEQ ID NO: 688 - DNA, 5346 bp, Homo sapiens
gcggccgctgcaggtccccgctcccctccccgtgcgtccgcccatggccgccgccgggcagctgtgcttgctctacctgtcggcggggctcctgtcccggctcggcgcagccttcaacttggacactcgggaggacaacgtgatccggaaatatggagaccccgggagcctcttcggcttctcgctggccatgcactggcaactgcagcccgaggacaagcggctgttgctcgtgggggccccgcgggcagaagcgcttccactgcagagagccaacagaacgggagggctgtacagctgcgacatcaccgcccgggggccatgcacgcggatcgagtttgataacgatgctgaccccacgtcagaaagcaaggaagatcagtggatgggggtcaccgtccagagccaaggtccagggggcaaggtcgtgacatgtgctcaccgatatgaaaaaaggcagcatgttaatacgaagcaggaatcccgagacatctttgggcggtgttatgtcctgagtcagaatctcaggattgaagacgatatggatgggggagattggagcttttgtgatgggcgattgagaggccatgagaaatttggctcttgccagcaaggtgtagcagctacttttactaaagactttcattacattgtatttggagccccgggtacttataactggaaagggattgttcgtgtagagcaaaagaataacactttttttgacatgaacatctttgaagatgggccttatgaagttggtggagagactgagcatgatgaaagtctcgttcctgttcctgctaacagttacttaggtttttctttggactcagggaaaggtattgtttctaaagatgagatcacttttgtatctggtgctcccagagccaatcacagtggagccgtggttttgctgaagagagacatgaagtctgcacatctcctccctgagcacatattcgatggagaaggtctggcctcttcatttggctatgatgtggcggtggtggacctcaacaaggatgggtggcaagatatagttattggagccccacagtattttgatagagatggagaagttggaggtgcagtgtatgtctacatgaaccagcaaggcagatggaataatgtgaagccaattcgtcttaatggaaccaaagattctatgtttggcattgcagtaaaaaatattggagatattaatcaagatggctacccagatattgcagttggagctccgtatgatgacttgggaaaggtttttatctatcatggatctgcaaatggaataaataccaaaccaacacaggttctcaagggtatatcaccttattttggatattcaattgctggaaacatggaccttgatcgaaattcctaccctgatgttgctgttggttccctctcagattcagtaactattttcagatcccggcctgtgattaatattcagaaaaccatcacagtaactcctaacagaattgacctccgccagaaaacagcgtgtggggcgcctagtgggatatgcctccaggttaaatcctgttttgaatatactgctaaccccgctggttataatccttcaatatcaattgtgggcacacttgaagctgaaaaagaaagaagaaaatctgggctatcctcaagagttcagtttcgaaaccaaggttctgagcccaaatatactcaagaactaactctgaagaggcagaaacagaaagtgtgcatggaggaaaccctgtggctacaggataatatcagagataaactgcgtcccattcccataactgcctcagtggagatccaagagccaagctctcgtaggcgagtgaattcacttccagaagttcttccaattctgaattcagatgaacccaagacagctcatattgatgttcacttcttaaaagagggatgtggagacgacaatgtatgtaacagcaaccttaaactagaatataaattttgcacccgagaaggaaatcaagacaaattttcttatttaccaattcaaaaaggtgtaccagaactagttctaaaagatcagaaggatattgctttagaaataacagtgacaaacagcccttccaacccaaggaatcccacaaaagatggcgatgacgcccatgaggctaaactgattgcaacgtttccagacactttaacctattctgcatatagagaactgagggctttccctgagaaacagttgagttgtgttgccaaccagaatggctcgcaagctgactgtgagctcggaaatccttttaaaagaaattcaaatgtcactttttatttggttttaagtacaactgaagtcacctttgacaccccagatctggatattaatctgaagttagaaacaacaagcaatcaagataatttggctccaattacagctaaagcaaaagtggttattgaactgcttttatcggtctcgggagttgctaaaccttcccaggtgtattttggaggtacagttgttggcgagcaagctatgaaatctgaagatgaagtgggaagtttaatagagtatgaattcagggtaataaacttaggtaaacctcttacaaacctcggcacagcaaccttgaacattcagtggccaaaagaaattagcaatgggaaatggttgctttatttggtgaaagtagaatccaaaggattggaaaaggtaacttgtgagccacaaaaggagataaactccctgaacctaacggagtctcacaactcaagaaagaaacgggaaattactgaaaaacagatagatgataacagaaaattttctttatttgctgaaagaaaataccagactcttaactgtagcgtgaacgtgaactgtgtgaacatcagatgcccgctgcgggggctggacagcaaggcgtctcttattttgcgctcgaggttatggaacagcacatttctagaggaatattccaaactgaactacttggacattctcatgcgagccttcattgatgtgactgctgctgccgaaaatatcaggctgccaaatgcaggcactcaggttcgagtgactgtgtttccctcaaagactgtagctcagtattcgggagtaccttggtggatcatcctagtggctattctcgctgggatcttgatgcttgctttattagtgtttatactatggaagtgtggattctttaaacgctctaggtacgatgacagtgttccccgataccatgctgtaaggatccggaaagaagagcgagagatcaaagatgaaaagtatattgataaccttgaaaaaaaacagtggatcacaaagtggaacgaaaatgaaagctactcatagcgggggcctaaaaaaaaaaagcttcacagtacccaaactgctttttccaactcagaaattcaatttggatttaaaagcctgctcaatccctgaggactgatttcagagtgactacacacagtacgaacctacagttttaactgtggatattgttacgtagcctaaggctcctgttttgcacagccaaatttaaaactgttggaatggatttttctttaactgccgtaatttaactttctgggttgcctttatttttggcgtggctgacttacatcatgtgttggggaagggcctgcccagttgcactcaggtgacatcctccagatagtgtagctgaggaggcacctacactcacctgcactaacagagtggccgtcctaacctcgggcctgctgcgcagacgtccatcacgttagctgtcccacatcacaagactatgccattggggtagttgtgtttcaacggaaagtgctgtcttaaactaaatgtgcaatagaaggtgatgttgccatcctaccgtcttttcctgtttcctagctgtgtgaatacctgctcacgtcaaatgcatacaagtttcattctccctttcactaaaacacacaggtgcaacagacttgaatgctagttatacttatttgtatatggtatttattttttcttttctttacaaaccattttgttattgactaacaggccaaagagtctccagtttacccttcaggttggtttaatcaatcagaattagagcatgggaggtcatcactttgacctaaattatttactgcaaaaagaaaatctttataaatgtaccagagagagttgttttaataacttatctataaactataacctctccttcatgacagcctccaccccacaacccaaaaggtttaagaaatagaattataactgtaaagatgtttatttcaggcattggatattttttactttagaagcctgcataatgtttctggatttcatactgtaacattcaggaattcttggagaaaatgggtttattcactgaactctagtgcggtttactcactgctgcaaatactgtatattcaggacttgaaagaaatggtgaatgcctatggtggatccaaactgatccagtataagactactgaatctgctaccaaaacagttaatcagtgagtcgatgttctattttttgttttgtttcctcccctatctgtattcccaaaaattactttggggctaatttaacaagaactttaaattgtgttttaattgtaaaaatggcagggggtggaattattactctatacattcaacagagactgaatagatatgaaagctgattttttttaattaccatgcttcacaatgttaagttatatggggagcaacagcaaacaggtgctaatttgttttggatatagtataagcagtgtctgtgttttgaaagaatagaacacagtttgtagtgccactgttgttttgggggggcttttttcttttcggaaatcttaaaccttaagatactaaggacgttgttttggttgtactttggaattcttagtcacaaaatatattttgtttacaaaaatttctgtaaaacaggttataacagtgtttaaagtctcagtttcttgcttggggaacttgtgtccctaatgtgtttagattgctagattgctaaggagctgatactttgacagtgtttttagacctgtgttactaaaaaaaagatgaatgtcctgaaaagggtgttgggagggtggttcaacaaagaaacaaagatgttatggtgtttagatttatggttgttaaaaatgtcatctcaagtcaagtcactggtctgtttgcatttgatacatttttgtactaactagcattgtaaaattatttcatgattagaaattacctgtggatatttgtataaaagtgtgaaataaattttttataaaagtgttcattgtttcgtaacacagcattgtatatgtgaagcaaactctaaaattataaatgacaacctgaattatctatttcatcaaacc

SEQ ID NO: 689 - DNA, 5476 bp, Homo sapiens
gcggccgctgcaggtccccgctcccctccccgtgcgtccgcccatggccgccgccgggcagctgtgcttgctctacctgtcggcggggctcctgtcccggctcggcgcagccttcaacttggacactcgggaggacaacgtgatccggaaatatggagaccccgggagcctcttcggcttctcgctggccatgcactggcaactgcagcccgaggacaagcggctgttgctcgtgggggccccgcgggcagaagcgcttccactgcagagagccaacagaacgggagggctgtacagctgcgacatcaccgcccgggggccatgcacgcggatcgagtttgataacgatgctgaccccacgtcagaaagcaaggaagatcagtggatgggggtcaccgtccagagccaaggtccagggggcaaggtcgtgacatgtgctcaccgatatgaaaaaaggcagcatgttaatacgaagcaggaatcccgagacatctttgggcggtgttatgtcctgagtcagaatctcaggattgaagacgatatggatgggggagattggagcttttgtgatgggcgattgagaggccatgagaaatttggctcttgccagcaaggtgtagcagctacttttactaaagactttcattacattgtatttggagccccgggtacttataactggaaagggattgttcgtgtagagcaaaagaataacactttttttgacatgaacatctttgaagatgggccttatgaagttggtggagagactgagcatgatgaaagtctcgttcctgttcctgctaacagttacttaggtttttctttggactcagggaaaggtattgtttctaaagatgagatcacttttgtatctggtgctcccagagccaatcacagtggagccgtggttttgctgaagagagacatgaagtctgcacatctcctccctgagcacatattcgatggagaaggtctggcctcttcatttggctatgatgtggcggtggtggacctcaacaaggatgggtggcaagatatagttattggagccccacagtattttgatagagatggagaagttggaggtgcagtgtatgtctacatgaaccagcaaggcagatggaataatgtgaagccaattcgtcttaatggaaccaaagattctatgtttggcattgcagtaaaaaatattggagatattaatcaagatggctacccagatattgcagttggagctccgtatgatgacttgggaaaggtttttatctatcatggatctgcaaatggaataaataccaaaccaacacaggttctcaagggtatatcaccttattttggatattcaattgctggaaacatggaccttgatcgaaattcctaccctgatgttgctgttggttccctctcagattcagtaactattttcagatcccggcctgtgattaatattcagaaaaccatcacagtaactcctaacagaattgacctccgccagaaaacagcgtgtggggcgcctagtgggatatgcctccaggttaaatcctgttttgaatatactgctaaccccgctggttataatccttcaatatcaattgtgggcacacttgaagctgaaaaagaaagaagaaaatctgggctatcctcaagagttcagtttcgaaaccaaggttctgagcccaaatatactcaagaactaactctgaagaggcagaaacagaaagtgtgcatggaggaaaccctgtggctacaggataatatcagagataaactgcgtcccattcccataactgcctcagtggagatccaagagccaagctctcgtaggcgagtgaattcacttccagaagttcttccaattctgaattcagatgaacccaagacagctcatattgatgttcacttcttaaaagagggatgtggagacgacaatgtatgtaacagcaaccttaaactagaatataaattttgcacccgagaaggaaatcaagacaaattttcttatttaccaattcaaaaaggtgtaccagaactagttctaaaagatcagaaggatattgctttagaaataacagtgacaaacagcccttccaacccaaggaatcccacaaaagatggcgatgacgcccatgaggctaaactgattgcaacgtttccagacactttaacctattctgcatatagagaactgagggctttccctgagaaacagttgagttgtgttgccaaccagaatggctcgcaagctgactgtgagctcggaaatccttttaaaagaaattcaaatgtcactttttatttggttttaagtacaactgaagtcacctttgacaccccagatctggatattaatctgaagttagaaacaacaagcaatcaagataatttggctccaattacagctaaagcaaaagtggttattgaactgcttttatcggtctcgggagttgctaaaccttcccaggtgtattttggaggtacagttgttggcgagcaagctatgaaatctgaagatgaagtgggaagtttaatagagtatgaattcagggtaataaacttaggtaaacctcttacaaacctcggcacagcaaccttgaacattcagtggccaaaagaaattagcaatgggaaatggttgctttatttggtgaaagtagaatccaaaggattggaaaaggtaacttgtgagccacaaaaggagataaactccctgaacctaacggagtctcacaactcaagaaagaaacgggaaattactgaaaaacagatagatgataacagaaaattttctttatttgctgaaagaaaataccagactcttaactgtagcgtgaacgtgaactgtgtgaacatcagatgcccgctgcgggggctggacagcaaggcgtctcttattttgcgctcgaggttatggaacagcacatttctagaggaatattccaaactgaactacttggacattctcatgcgagccttcattgatgtgactgctgctgccgaaaatatcaggctgccaaatgcaggcactcaggttcgagtgactgtgtttccctcaaagactgtagctcagtattcgggagtaccttggtggatcatcctagtggctattctcgctgggatcttgatgcttgctttattagtgtttatactatggaagtgtggtttcttcaagagaaataagaaagatcattatgatgccacatatcacaaggctgagatccatgctcagccatctgataaagagaggcttacttctgatgcatagtattgatctacttctgtaattgtgtggattctttaaacgctctaggtacgatgacagtgttccccgataccatgctgtaaggatccggaaagaagagcgagagatcaaagatgaaaagtatattgataaccttgaaaaaaaacagtggatcacaaagtggaacgaaaatgaaagctactcatagcgggggcctaaaaaaaaaaagcttcacagtacccaaactgctttttccaactcagaaattcaatttggatttaaaagcctgctcaatccctgaggactgatttcagagtgactacacacagtacgaacctacagttttaactgtggatattgttacgtagcctaaggctcctgttttgcacagccaaatttaaaactgttggaatggatttttctttaactgccgtaatttaactttctgggttgcctttatttttggcgtggctgacttacatcatgtgttggggaagggcctgcccagttgcactcaggtgacatcctccagatagtgtagctgaggaggcacctacactcacctgcactaacagagtggccgtcctaacctcgggcctgctgcgcagacgtccatcacgttagctgtcccacatcacaagactatgccattggggtagttgtgtttcaacggaaagtgctgtcttaaactaaatgtgcaatagaaggtgatgttgccatcctaccgtcttttcctgtttcctagctgtgtgaatacctgctcacgtcaaatgcatacaagtttcattctccctttcactaaaacacacaggtgcaacagacttgaatgctagttatacttatttgtatatggtatttattttttcttttctttacaaaccattttgttattgactaacaggccaaagagtctccagtttacccttcaggttggtttaatcaatcagaattagagcatgggaggtcatcactttgacctaaattatttactgcaaaaagaaaatctttataaatgtaccagagagagttgttttaataacttatctataaactataacctctccttcatgacagcctccaccccacaacccaaaaggtttaagaaatagaattataactgtaaagatgtttatttcaggcattggatattttttactttagaagcctgcataatgtttctggatttcatactgtaacattcaggaattcttggagaaaatgggtttattcactgaactctagtgcggtttactcactgctgcaaatactgtatattcaggacttgaaagaaatggtgaatgcctatggtggatccaaactgatccagtataagactactgaatctgctaccaaaacagttaatcagtgagtcgatgttctattttttgttttgtttcctcccctatctgtattcccaaaaattactttggggctaatttaacaagaactttaaattgtgttttaattgtaaaaatggcagggggtggaattattactctatacattcaacagagactgaatagatatgaaagctgattttttttaattaccatgcttcacaatgttaagttatatggggagcaacagcaaacaggtgctaatttgttttggatatagtataagcagtgtctgtgttttgaaagaatagaacacagtttgtagtgccactgttgttttgggggggcttttttcttttcggaaatcttaaaccttaagatactaaggacgttgttttggttgtactttggaattcttagtcacaaaatatattttgtttacaaaaatttctgtaaaacaggttataacagtgtttaaagtctcagtttcttgcttggggaacttgtgtccctaatgtgtttagattgctagattgctaaggagctgatactttgacagtgtttttagacctgtgttactaaaaaaaagatgaatgtcctgaaaagggtgttgggagggtggttcaacaaagaaacaaagatgttatggtgtttagatttatggttgttaaaaatgtcatctcaagtcaagtcactggtctgtttgcatttgatacatttttgtactaactagcattgtaaaattatttcatgattagaaattacctgtggatatttgtataaaagtgtgaaataaattttttataaaagtgttcattgtttcgtaacacagcattgtatatgtgaagcaaactctaaaattataaatgacaacctgaattatctatttcatcaaacc

SEQ ID NO: 690 - DNA, 5463 bp, Homo sapiens
gcggccgctgcaggtccccgctcccctccccgtgcgtccgcccatggccgccgccgggcagctgtgcttgctctacctgtcggcggggctcctgtcccggctcggcgcagccttcaacttggacactcgggaggacaacgtgatccggaaatatggagaccccgggagcctcttcggcttctcgctggccatgcactggcaactgcagcccgaggacaagcggctgttgctcgtgggggccccgcgggcagaagcgcttccactgcagagagccaacagaacgggagggctgtacagctgcgacatcaccgcccgggggccatgcacgcggatcgagtttgataacgatgctgaccccacgtcagaaagcaaggaagatcagtggatgggggtcaccgtccagagccaaggtccagggggcaaggtcgtgacatgtgctcaccgatatgaaaaaaggcagcatgttaatacgaagcaggaatcccgagacatctttgggcggtgttatgtcctgagtcagaatctcaggattgaagacgatatggatgggggagattggagcttttgtgatgggcgattgagaggccatgagaaatttggctcttgccagcaaggtgtagcagctacttttactaaagactttcattacattgtatttggagccccgggtacttataactggaaagggattgttcgtgtagagcaaaagaataacactttttttgacatgaacatctttgaagatgggccttatgaagttggtggagagactgagcatgatgaaagtctcgttcctgttcctgctaacagttacttaggcctgctgtttttgaccagcgtttcctatacagatcctgatcagtttgtttataaaacacggcctccccgggagcagcctgacacattccctgatgtgatgatgaatagctacctaggtttttctttggactcagggaaaggtattgtttctaaagatgagatcacttttgtatctggtgctcccagagccaatcacagtggagccgtggttttgctgaagagagacatgaagtctgcacatctcctccctgagcacatattcgatggagaaggtctggcctcttcatttggctatgatgtggcggtggtggacctcaacaaggatgggtggcaagatatagttattggagccccacagtattttgatagagatggagaagttggaggtgcagtgtatgtctacatgaaccagcaaggcagatggaataatgtgaagccaattcgtcttaatggaaccaaagattctatgtttggcattgcagtaaaaaatattggagatattaatcaagatggctacccagatattgcagttggagctccgtatgatgacttgggaaaggtttttatctatcatggatctgcaaatggaataaataccaaaccaacacaggttctcaagggtatatcaccttattttggatattcaattgctggaaacatggaccttgatcgaaattcctaccctgatgttgctgttggttccctctcagattcagtaactattttcagatcccggcctgtgattaatattcagaaaaccatcacagtaactcctaacagaattgacctccgccagaaaacagcgtgtggggcgcctagtgggatatgcctccaggttaaatcctgttttgaatatactgctaaccccgctggttataatccttcaatatcaattgtgggcacacttgaagctgaaaaagaaagaagaaaatctgggctatcctcaagagttcagtttcgaaaccaaggttctgagcccaaatatactcaagaactaactctgaagaggcagaaacagaaagtgtgcatggaggaaaccctgtggctacaggataatatcagagataaactgcgtcccattcccataactgcctcagtggagatccaagagccaagctctcgtaggcgagtgaattcacttccagaagttcttccaattctgaattcagatgaacccaagacagctcatattgatgttcacttcttaaaagagggatgtggagacgacaatgtatgtaacagcaaccttaaactagaatataaattttgcacccgagaaggaaatcaagacaaattttcttatttaccaattcaaaaaggtgtaccagaactagttctaaaagatcagaaggatattgctttagaaataacagtgacaaacagcccttccaacccaaggaatcccacaaaagatggcgatgacgcccatgaggctaaactgattgcaacgtttccagacactttaacctattctgcatatagagaactgagggctttccctgagaaacagttgagttgtgttgccaaccagaatggctcgcaagctgactgtgagctcggaaatccttttaaaagaaattcaaatgtcactttttatttggttttaagtacaactgaagtcacctttgacaccccagatctggatattaatctgaagttagaaacaacaagcaatcaagataatttggctccaattacagctaaagcaaaagtggttattgaactgcttttatcggtctcgggagttgctaaaccttcccaggtgtattttggaggtacagttgttggcgagcaagctatgaaatctgaagatgaagtgggaagtttaatagagtatgaattcagggtaataaacttaggtaaacctcttacaaacctcggcacagcaaccttgaacattcagtggccaaaagaaattagcaatgggaaatggttgctttatttggtgaaagtagaatccaaaggattggaaaaggtaacttgtgagccacaaaaggagataaactccctgaacctaacggagtctcacaactcaagaaagaaacgggaaattactgaaaaacagatagatgataacagaaaattttctttatttgctgaaagaaaataccagactcttaactgtagcgtgaacgtgaactgtgtgaacatcagatgcccgctgcgggggctggacagcaaggcgtctcttattttgcgctcgaggttatggaacagcacatttctagaggaatattccaaactgaactacttggacattctcatgcgagccttcattgatgtgactgctgctgccgaaaatatcaggctgccaaatgcaggcactcaggttcgagtgactgtgtttccctcaaagactgtagctcagtattcgggagtaccttggtggatcatcctagtggctattctcgctgggatcttgatgcttgctttattagtgtttatactatggaagtgtggattctttaaacgctctaggtacgatgacagtgttccccgataccatgctgtaaggatccggaaagaagagcgagagatcaaagatgaaaagtatattgataaccttgaaaaaaaacagtggatcacaaagtggaacgaaaatgaaagctactcatagcgggggcctaaaaaaaaaaagcttcacagtacccaaactgctttttccaactcagaaattcaatttggatttaaaagcctgctcaatccctgaggactgatttcagagtgactacacacagtacgaacctacagttttaactgtggatattgttacgtagcctaaggctcctgttttgcacagccaaatttaaaactgttggaatggatttttctttaactgccgtaatttaactttctgggttgcctttatttttggcgtggctgacttacatcatgtgttggggaagggcctgcccagttgcactcaggtgacatcctccagatagtgtagctgaggaggcacctacactcacctgcactaacagagtggccgtcctaacctcgggcctgctgcgcagacgtccatcacgttagctgtcccacatcacaagactatgccattggggtagttgtgtttcaacggaaagtgctgtcttaaactaaatgtgcaatagaaggtgatgttgccatcctaccgtcttttcctgtttcctagctgtgtgaatacctgctcacgtcaaatgcatacaagtttcattctccctttcactaaaacacacaggtgcaacagacttgaatgctagttatacttatttgtatatggtatttattttttcttttctttacaaaccattttgttattgactaacaggccaaagagtctccagtttacccttcaggttggtttaatcaatcagaattagagcatgggaggtcatcactttgacctaaattatttactgcaaaaagaaaatctttataaatgtaccagagagagttgttttaataacttatctataaactataacctctccttcatgacagcctccaccccacaacccaaaaggtttaagaaatagaattataactgtaaagatgtttatttcaggcattggatattttttactttagaagcctgcataatgtttctggatttcatactgtaacattcaggaattcttggagaaaatgggtttattcactgaactctagtgcggtttactcactgctgcaaatactgtatattcaggacttgaaagaaatggtgaatgcctatggtggatccaaactgatccagtataagactactgaatctgctaccaaaacagttaatcagtgagtcgatgttctattttttgttttgtttcctcccctatctgtattcccaaaaattactttggggctaatttaacaagaactttaaattgtgttttaattgtaaaaatggcagggggtggaattattactctatacattcaacagagactgaatagatatgaaagctgattttttttaattaccatgcttcacaatgttaagttatatggggagcaacagcaaacaggtgctaatttgttttggatatagtataagcagtgtctgtgttttgaaagaatagaacacagtttgtagtgccactgttgttttgggggggcttttttcttttcggaaatcttaaaccttaagatactaaggacgttgttttggttgtactttggaattcttagtcacaaaatatattttgtttacaaaaatttctgtaaaacaggttataacagtgtttaaagtctcagtttcttgcttggggaacttgtgtccctaatgtgtttagattgctagattgctaaggagctgatactttgacagtgtttttagacctgtgttactaaaaaaaagatgaatgtcctgaaaagggtgttgggagggtggttcaacaaagaaacaaagatgttatggtgtttagatttatggttgttaaaaatgtcatctcaagtcaagtcactggtctgtttgcatttgatacatttttgtactaactagcattgtaaaattatttcatgattagaaattacctgtggatatttgtataaaagtgtgaaataaattttttataaaagtgttcattgtttcgtaacacagcattgtatatgtgaagcaaactctaaaattataaatgacaacctgaattatctatttcatcaaacc

SEQ ID NO: 691 - DNA, 1427 bp, Homo sapiens
ctgggaatatgattatgcttaatctatgctcagttgaaaggggctggggctgctttctcccctcccttcttgactctctgttcacagaactcaggctgcctccagccagcctttgcccgctagactcactggccctgagcacttgaaggtgcagcaagtcactgagaatgagcactttcttctcggacacagcatggatctgcctggctgtccccacagtactatgtgggacagtattttgcaaatacaagaagagctcagggcagctgtggagctggatggtctgcctggcaggcctctgtgcagtctgcctgctcatcctgtcccctttttggggcttgatcctcttctcggtgtcatgcttcctcatgtatacttacttatctggccaagaattgttacctgtggatcagaaggcagtcctggtgacaggtggtgattgcgggcttggccatgctttgtgcaagtatctggatgagctgggcttcacggtatttgccggagttttgaatgaaaatggcccaggagctgaggaattgcgaagaacctgctctccgcgcctctcggtgctccaaatggacatcacgaagccagtgcagataaaagatgcttacagcaaggttgcagcaatgctgcaggacagaggactgtgggctgtgatcaacaatgctggggtgcttggctttccaactgatggggagcttcttcttatgactgactacaaacaatgcatggccgtgaacttctttggaactgtggaggtcacaaagacgtttttgcctcttcttagaaaatccaaagggaggctggtgaatgtcagcagcatgggaggaggggccccaatggaaaggctggcatcttatggctcatcaaaggcggctgtgaccatgttctcatcagttatgagactggagctttccaagtggggaattaaagttgcttccatccaacctggaggcttcctaacaaatatcgcaggcaccagtgacaagtgggaaaagctggagaaggacattctggaccacctccccgctgaggtacaggaagactacggccaggactacatcttagcacagcggaatttcctcctattgatcaactcgttagccagcaaggacttctctccggtgctgcgggacatccagcatgctatcttggcgaagagcccttttgcctattacacgccagggaaaggcgcttacttgtggatctgccttgctcactatttgcctattggcatatatgattactttgctaaaagacattttggccaagacaagcccatgcccagagctctaagaatgcctaactacaagaaaaaggccacctaggcaatggaagccctcaaagaagtcggaatgtcatagtcttgaaatgaaagggaaactgggaaactgggtttctcattaaagttgtttcccactctg

SEQ ID NO: 692 - DNA, 1111 bp, Homo sapiens
cgcagttaggcagcagcagccgcggacgagtagccgccgtgggagggagccatgaagcattacgaggtggagattctggacgcaaagacaagggagaagctgtgtttcttggacaaggtggagccccacgccaccattgcggagatcaagaacctcttcactaagacccatccgcagtggtaccccgcccgccagtccctccgcctggaccccaagggcaagtccctgaaggatgaggatgttctgcagaagctgcccgtgggcaccacggccacactgtacttccgggacctgggggcccagatcagctgggtgacggtcttcctaacagagtacgcggggccccttttcatctacctgctcttctacttccgagtgcccttcatctatggccacaaatatgactttacgtccagtcggcatacagtggtgcacctcgcctgcatctgtcactcattccactacatcaagcgcctgctggagacgctcttcgtgcaccgcttctcccatggcactatgcctttgcgcaacatcttcaagaactgcacctactactggggcttcgccgcgtggatggcctattacatcaatcaccctctctacactccccctacctacggagctcagcaggtgaaactggcgctcgccatctttgtgatctgccagctcggcaacttctccatccacatggccctgcgggacctgcggcccgctgggtccaagacgcggaagatcccataccccaccaagaaccccttcacgtggctcttcctgctggtgtcctgccccaactacacctacgaggtggggtcctggatcggtttcgccatcatgacgcagtgtctcccagtggccctgttctccctggtgggcttcacccagatgaccatctgggccaagggcaagcaccgcagctacctgaaggagttccgggactacccgcccctgcgcatgcccatcatccccttcctgctctgagcgctcacccctgctgaggctcagcccctcaacccggtggcattctgggggaggagtggggcccacagctctccagcacccggaataaagcccgcctgccccagtcaaaaaaaaaaaaaaaaaaaaaaaaaaa

SEQ ID NO: 693 - DNA, 2207 bp, Homo sapiens
tataaaaatagctcttgttaccggaaataactgttcatttttcactcctccctcctaggtcacacttttcagaaaaagaatctgcatcctggaaaccagaagaaaaatatgagacggggaatcatcgtgtgatgtgtgtgctgcctttggctgagtgtgtggagtcctgctcaggtgttaggtacagtgtgtttgatcgtggtggcttgaggggaacccgctgttcagagctgtgactgcggctgcactcagagaagctgcccttggctgctcgtagcgccgggccttctctcctcgtcatcatccagagcagccagtgtccgggaggcagaagatgccccactccagcctgcatccatccatcccgtgtcccaggggtcacggggcccagaaggcagccttggttctgctgagtgcctgcctggtgaccctttgggggctaggagagccaccagagcacactctccggtacctggtgctccacctagcctccctgcagctgggactgctgttaaacggggtctgcagcctggctgaggagctgcgccacatccactccaggtaccggggcagctactggaggactgtgcgggcctgcctgggctgccccctccgccgtggggccctgttgctgctgtccatctatttctactactccctcccaaatgcggtcggcccgcccttcacttggatgcttgccctcctgggcctctcgcaggcactgaacatcctcctgggcctcaagggcctggccccagctgagatctctgcagtgtgtgaaaaagggaatttcaacgtggcccatgggctggcatggtcatattacatcggatatctgcggctgatcctgccagagctccaggcccggattcgaacttacaatcagcattacaacaacctgctacggggtgcagtgagccagcggctgtatattctcctcccattggactgtggggtgcctgataacctgagtatggctgaccccaacattcgcttcctggataaactgccccagcagaccggtgaccgtgctggcatcaaggatcgggtttacagcaacagcatctatgagcttctggagaacgggcagcgggcgggcacctgtgtcctggagtacgccacccccttgcagactttgtttgccatgtcacaatacagtcaagctggctttagccgggaggataggcttgagcaggccaaactcttctgccggacacttgaggacatcctggcagatgcccctgagtctcagaacaactgccgcctcattgcctaccaggaacctgcagatgacagcagcttctcgctgtcccaggaggttctccggcacctgcggcaggaggaaaaggaagaggttactgtgggcagcttgaagacctcagcggtgcccagtacctccacgatgtcccaagagcctgagctcctcatcagtggaatggaaaagcccctccctctccgcacggatttctcttgagacccagggtcaccaggccagagcctccagtggtctccaagcctctggactgggggctctcttcagtggctgaatgtccagcagagctatttccttccacagggggccttgcagggaagggtccaggacttgacatcttaagatgcgtcttgtccccttgggccagtcatttcccctctctgagcctcggtgtcttcaacctgtgaaatgggatcataatcactgccttacctccctcacggttgttgtgaggactgagtgtgtggaagtttttcataaactttggatgctagtgtacttagggggtgtgccaggtgtctttcatggggccttccagacccactccccacccttctccccttcctttgcccggggacgccgaactctctcaatggtatcaacaggctccttcgccctctggctcctggtcatgttccattattggggagccccagcagaagaatggagaggaggaggaggctgagtttggggtattgaatcccccggctcccaccctgcagcatcaaggttgctatggactctcctgccgggcaactcttgcgtaatcatgactatctctaggattctggcaccacttccttccctggccccttaagcctagctgtgtatcggcacccccaccccactagagtactccctctcacttgcggtttccttatactccacccctttctcaacggtccttttttaaagcacatctcagattacccaa

SEQ ID NO: 694 - DNA, 3724 bp, Homo sapiens
tatgacccctttaaggcgcggccagagtcctcccgcagaaaaacgacttaaaggagacgcgtggcgcgatggcggcggccccacgcgcgggccggcggcgcgggcagccgctcctggcgctgctgcttctgctgctggcgccactgccgccgggggccccgccgggcgccgacgcctacttccccgaggagcgctggagcccggagtcgcccctgcaggcgccgcgcgtgctcatcgcgctgttggcgcgaaacgcggcccacgcgttgcccaccacgctgggcgcactcgagcggctgcggcacccgcgggagcgcacggcgctatgggtggctacggaccacaacatggataacacgtcaactgtgctgcgggagtggctggtggccgtgaagagtttgtaccattccgtggagtggcggccagcagaggagcccaggtcctacccggacgaggaaggcccgaaacactggtctgactcacgctacgagcatgtcatgaagttgcgccaggcagccctgaaatcagctcgagacatgtgggctgattacatcctgtttgtagatgcggacaacctgatcctcaaccctgacacactgagcctgctcatcgctgagaacaagacggtggtcgcccccatgctggattcccgggctgcgtactccaacttctggtgtggaatgacttcccagggctactacaagcgcacacctgcctacatccctatccgcaagcgagaccgccggggctgctttgcagttcccatggtgcactcgaccttcctgatcgacctgcggaaggcggcgtccaggaacctggccttctacccacctcaccctgactacacctggtcctttgacgacatcatcgtctttgccttctcctgcaagcaggcaggtacgtacatgagggccactgggcctcgcctgtttttacatttgtctgttgcttccctgcccactgcagaggttcagatgtatgtgtgcaacaaggaggagtacggattcttgccagtgccattgcgcgcccacagcaccctccaggatgaggccgagagcttcatgcatgtgcagctggaggtcatggtgaagcacccgcccgcagagccctcccgcttcatctcggctcccaccaagacaccggacaagatgggcttcgacgaggtcttcatgatcaacctgaggcggcggcaggaccggcgggagcgcatgctgcgggcgctgcaggcacaggagatcgagtgccggctggtggaggccgtggacggcaaagccatgaacaccagccaggtggaggcgctggggatccagatgctgcctggctaccgggacccctaccacggccggcccctcaccaagggtgagctgggctgcttcctgagccactacaacatctggaaggaggtggtggaccgggggctgcagaaatcgcttgtgtttgaggatgacctgcgttttgagatcttcttcaagagacgtctgatgaacctcatgcgggatgtggagcgggagggcctggactgggacctcatctatgtgggccggaagcggatgcaggtggagcaccccgagaaggctgtgcctcgcgtgaggaacctggtggaggccgactattcctactggaccctggcctacgtgatctccctgcaaggcgcccgcaaactgctggctgctgagccgctctccaagatgctgcctgtggacgagttcctgcccgtcatgttcgacaaacacccagtgtccgagtacaaggcccacttctccctccgcaacctgcatgccttctctgtggagccgctgctcatctaccccacacactacacaggagacgatggctatgtgagtgacaccgagacctcagtcgtatggaacaatgagcacgtcaagaccgactgggaccgcgccaagtcccagaagatgcgggagcagcaggcactgagccgtgaggccaagaactcggacgtgctccagtccccactggacagtgctgcccgggatgaactctgaggggtagcagccagaaagccaaagcagccatcggtggcccaggctccacgtgcttactgaggacatcagggccacctctggaccccttggcaggccacagagggctctcgtgtggggtggtgtccagccagctcttgctaagcaatcacgtgcacacaggcagcattaatggagtgcctactgcatgccagcaacagggcttggccctggggaattgggaggaaccaagccctcttcatctgttcatgtgcccagcatttattaagcacctgctgtatgcaaggttcccatgttacggcagtgaatgaggcataattgttccctccatcagcgattgattcagtcatcaagcagttactgatcagattaagaatcaggcactagtgatacacattcatttttaaaattcattcaaggatttattgagtgcctactgtgtgttgggtgccattccaggctctgggatttttttttttttttttttaagagtagagtctgtctctgtcacccaggctggagtgcagtggtgtgacggctcactgcagcctgcgcctcccagcgtccagcaattcttgtttctcggcctcccaagtagctgggactataggtgcgtgccatcacatctggctagtttttgtatttttagtagagacggggtttcaccatgttggccagactggtctcgaactcctgacctcaagtgatctgcccgccttggccacccaaagtgctagggttacaggcatgagccactgtgcccagcccaggctctgggaatattgagataaataagatgcttctatccatttattcaagcacatattggtcacctactgtgtgcctggcactcatgtcacaaagataagttcctgattcggtacacttactgagcacctgctgtgtgcagggagctgagctatgggatgggaatgggagtaaacaaggtacttttcacttttttctttttttcctcactgctagacggtgtgggaacttctcactcattggcttctttcccacacacctgaagagcactgactgtgtgccgggcactagtgatacaaaagagtgtgacagttgttcagtctgcattttcgatcatgggctacatgccgagtgctggggcacagagatgaacaagatcggttccttcacttcttcatgccacaagtgtttattgagcacctgtgtgccaggcctcacagactcccagttgggttgaagaatggttgactgagtttgattcttcctgtaccctcggtcgtctgagctgtgtgcagacaacatccccccaccacccaagagggagggtagctcttccgccaccaggggcaagcacaggtcctggtggccccacgccacatgttagcccccctggagggggcgccagttggagacgggggctgggtgtccctggcccactcccagtcccctgtgctttacctccttgcccttgtgtctcaggtgtggtccctgcctgcttgatgaagttgctctgttcaagcctttggtgggatcatgtgtttgggggcttttaggggacccagctgcactggggcactgcccgtggcctgggtaggacatttcccagcaagggctggaggagttgccgtgccttcagcctgaatcgaatgtcagaaccagccagcggtgcttcaccctcttggggataacttgcttagttttttaataaatgttcctggttggttttcacagca

SEQ ID NO: 695 - DNA, 2561 bp, Homo sapiens
gtcttcatgatcaacctgaggcggcggcaggaccggcgggagcgcatgctgcgggcgctgcaggcacaggagatcgagtgccggctggtggaggccgtggacggcaaagccatgaacaccagccaggtggaggcgctggggatccagatgctgcctggctaccgggacccctaccacggccggcccctcaccaagggtgagctgggctgcttcctgagccactacaacatctggaaggaggtggtggaccgggggctgcagaaatcgcttgtgtttgaggatgacctgcgttttgagatcttcttcaagagacgtctgatgaacctcatgcgggatgtggagcgggagggcctggactgggacctcatctatgtgggccggaagcggatgcaggtggagcaccccgagaaggctgtgcctcgcgtgaggaacctggtggaggccgactattcctactggaccctggcctacgtgatctccctgcaaggcgcccgcaaactgctggctgctgagccgctctccaagatgctgcctgtggacgagttcctgcccgtcatgttcgacaaacacccagtgtccgagtacaaggcccacttctccctccgcaacctgcatgccttctctgtggagccgctgctcatctaccccacacactacacaggagacgatggctatgtgagtgacaccgagacctcagtcgtatggaacaatgagcacgtcaagaccgactgggaccgcgccaagtcccagaagatgcgggagcagcaggcactgagccgtgaggccaagaactcggacgtgctccagtccccactggacagtgctgcccgggatgaactctgaggggtagcagccagaaagccaaagcagccatcggtggcccaggctccacgtgcttactgaggacatcagggccacctctggaccccttggcaggccacagagggctctcgtgtggggtggtgtccagccagctcttgctaagcaatcacgtgcacacaggcagcattaatggagtgcctactgcatgccagcaacagggcttggccctggggaattgggaggaaccaagccctcttcatctgttcatgtgcccagcatttattaagcacctgctgtatgcaaggttcccatgttacggcagtgaatgaggcataattgttccctccatcagcgattgattcagtcatcaagcagttactgatcagattaagaatcaggcactagtgatacacattcatttttaaaattcattcaaggatttattgagtgcctactgtgtgttgggtgccattccaggctctgggatttttttttttttttttttaagagtagagtctgtctctgtcacccaggctggagtgcagtggtgtgacggctcactgcagcctgcgcctcccagcgtccagcaattcttgtttctcggcctcccaagtagctgggactataggtgcgtgccatcacatctggctagtttttgtatttttagtagagacggggtttcaccatgttggccagactggtctcgaactcctgacctcaagtgatctgcccgccttggccacccaaagtgctagggttacaggcatgagccactgtgcccagcccaggctctgggaatattgagataaataagatgcttctatccatttattcaagcacatattggtcacctactgtgtgcctggcactcatgtcacaaagataagttcctgattcggtacacttactgagcacctgctgtgtgcagggagctgagctatgggatgggaatgggagtaaacaaggtacttttcacttttttctttttttcctcactgctagacggtgtgggaacttctcactcattggcttctttcccacacacctgaagagcactgactgtgtgccgggcactagtgatacaaaagagtgtgacagttgttcagtctgcattttcgatcatgggctacatgccgagtgctggggcacagagatgaacaagatcggttccttcacttcttcatgccacaagtgtttattgagcacctgtgtgccaggcctcacagactcccagttgggttgaagaatggttgactgagtttgattcttcctgtaccctcggtcgtctgagctgtgtgcagacaacatccccccaccacccaagagggagggtagctcttccgccaccaggggcaagcacaggtcctggtggccccacgccacatgttagcccccctggagggggcgccagttggagacgggggctgggtgtccctggcccactcccagtcccctgtgctttacctccttgcccttgtgtctcaggtgtggtccctgcctgcttgatgaagttgctctgttcaagcctttggtgggatcatgtgtttgggggcttttaggggacccagctgcactggggcactgcccgtggcctgggtaggacatttcccagcaagggctggaggagttgccgtgccttcagcctgaatcgaatgtcagaaccagccagcggtgcttcaccctcttggggataacttgcttagttttttaataaatgttcctggttggttttcacagca

SEQ ID NO: 696 - DNA, 1763 bp, Homo sapiens
tatgacccctttaaggcgcggccagagtcctcccgcagaaaaacgacttaaaggagacgcgtggcgcgatggcggcggccccacgcgcgggccggcggcgcgggcagccgctcctggcgctgctgcttctgctgctggcgccactgccgccgggggccccgccgggcgccgacgcctacttccccgaggagcgctggagcccggagtcgcccctgcaggcgccgcgcgtgctcatcgcgctgttggcgcgaaacgcggcccacgcgttgcccaccacgctgggcgcactcgagcggctgcggcacccgcgggagcgcacggcgctatgggtggctacggaccacaacatggataacacgtcaactgtgctgcgggagtggctggtggccgtgaagagtttgtaccattccgtggagtggcggccagcagaggagcccaggtcctacccggacgaggaaggcccgaaacactggtctgactcacgctacgagcatgtcatgaagttgcgccaggcagccctgaaatcagctcgagacatgtgggctgattacatcctgtttgtagatgcggacaacctgatcctcaaccctgacacactgagcctgctcatcgctgagaacaagacggtggtcgcccccatgctggattcccgggctgcgtactccaacttctggtgtggaatgacttcccagggctactacaagcgcacacctgcctacatccctatccgcaagcgagaccgccggggctgctttgcagttcccatggtgcactcgaccttcctgatcgacctgcggaaggcggcgtccaggaacctggccttctacccacctcaccctgactacacctggtcctttgacgacatcatcgtctttgccttctcctgcaagcaggcagaggttcagatgtatgtgtgcaacaaggaggagtacggattcttgccagtgccattgcgcgcccacagcaccctccaggatgaggccgagagcttcatgcatgtgcagctggaggtcatggtgaagcacccgcccgcagagccctcccgcttcatctcggctcccaccaagacaccggacaagatgggcttcgacgaggtcttcatgatcaacctgaggcggcggcaggaccggcgggagcgcatgctgcgggcgctgcaggcacaggagatcgagtgccggctggtggaggccgtggacggcaaagccatgaacaccagccaggtggaggcgctggggatccagatgctgcctggctaccgggacccctaccacggccggcccctcaccaagggtgagctgggctgcttcctgagccactacaacatctggaaggaggtggtggaccgggggctgcagaaatcgcttgtgtttgaggatgacctgcgttttgagatcttcttcaagagacgtctgatgaacctcatgcgggatgtggagcgggagggcctggactgggacctcatctatgtgggccggaagcggatgcaggtggagcaccccgagaaggctgtgcctcgcgtgaggaacctggtggaggccgactattcctactggaccctggcctacgtgatctccctgcaaggcgcccgcaaactgctggctgctgagccgctctccaagatgctgcctgtggacgagttcctgcccgtcatgttcgacaaacacccagttacaaggcccacttctccctccgcaacctgcatgccttctctgtggagccgctgctcatctaccccacacactacacaggagacgatggctatg

SEQ ID NO: 697 - DNA, 3655 bp, Homo sapiens
tatgacccctttaaggcgcggccagagtcctcccgcagaaaaacgacttaaaggagacgcgtggcgcgatggcggcggccccacgcgcgggccggcggcgcgggcagccgctcctggcgctgctgcttctgctgctggcgccactgccgccgggggccccgccgggcgccgacgcctacttccccgaggagcgctggagcccggagtcgcccctgcaggcgccgcgcgtgctcatcgcgctgttggcgcgaaacgcggcccacgcgttgcccaccacgctgggcgcactcgagcggctgcggcacccgcgggagcgcacggcgctatgggtggctacggaccacaacatggataacacgtcaactgtgctgcgggagtggctggtggccgtgaagagtttgtaccattccgtggagtggcggccagcagaggagcccaggtcctacccggacgaggaaggcccgaaacactggtctgactcacgctacgagcatgtcatgaagttgcgccaggcagccctgaaatcagctcgagacatgtgggctgattacatcctgtttgtagatgcggacaacctgatcctcaaccctgacacactgagcctgctcatcgctgagaacaagacggtggtcgcccccatgctggattcccgggctgcgtactccaacttctggtgtggaatgacttcccagggctactacaagcgcacacctgcctacatccctatccgcaagcgagaccgccggggctgctttgcagttcccatggtgcactcgaccttcctgatcgacctgcggaaggcggcgtccaggaacctggccttctacccacctcaccctgactacacctggtcctttgacgacatcatcgtctttgccttctcctgcaagcaggcagaggttcagatgtatgtgtgcaacaaggaggagtacggattcttgccagtgccattgcgcgcccacagcaccctccaggatgaggccgagagcttcatgcatgtgcagctggaggtcatggtgaagcacccgcccgcagagccctcccgcttcatctcggctcccaccaagacaccggacaagatgggcttcgacgaggtcttcatgatcaacctgaggcggcggcaggaccggcgggagcgcatgctgcgggcgctgcaggcacaggagatcgagtgccggctggtggaggccgtggacggcaaagccatgaacaccagccaggtggaggcgctggggatccagatgctgcctggctaccgggacccctaccacggccggcccctcaccaagggtgagctgggctgcttcctgagccactacaacatctggaaggaggtggtggaccgggggctgcagaaatcgcttgtgtttgaggatgacctgcgttttgagatcttcttcaagagacgtctgatgaacctcatgcgggatgtggagcgggagggcctggactgggacctcatctatgtgggccggaagcggatgcaggtggagcaccccgagaaggctgtgcctcgcgtgaggaacctggtggaggccgactattcctactggaccctggcctacgtgatctccctgcaaggcgcccgcaaactgctggctgctgagccgctctccaagatgctgcctgtggacgagttcctgcccgtcatgttcgacaaacacccagtgtccgagtacaaggcccacttctccctccgcaacctgcatgccttctctgtggagccgctgctcatctaccccacacactacacaggagacgatggctatgtgagtgacaccgagacctcagtcgtatggaacaatgagcacgtcaagaccgactgggaccgcgccaagtcccagaagatgcgggagcagcaggcactgagccgtgaggccaagaactcggacgtgctccagtccccactggacagtgctgcccgggatgaactctgaggggtagcagccagaaagccaaagcagccatcggtggcccaggctccacgtgcttactgaggacatcagggccacctctggaccccttggcaggccacagagggctctcgtgtggggtggtgtccagccagctcttgctaagcaatcacgtgcacacaggcagcattaatggagtgcctactgcatgccagcaacagggcttggccctggggaattgggaggaaccaagccctcttcatctgttcatgtgcccagcatttattaagcacctgctgtatgcaaggttcccatgttacggcagtgaatgaggcataattgttccctccatcagcgattgattcagtcatcaagcagttactgatcagattaagaatcaggcactagtgatacacattcatttttaaaattcattcaaggatttattgagtgcctactgtgtgttgggtgccattccaggctctgggatttttttttttttttttttaagagtagagtctgtctctgtcacccaggctggagtgcagtggtgtgacggctcactgcagcctgcgcctcccagcgtccagcaattcttgtttctcggcctcccaagtagctgggactataggtgcgtgccatcacatctggctagtttttgtatttttagtagagacggggtttcaccatgttggccagactggtctcgaactcctgacctcaagtgatctgcccgccttggccacccaaagtgctagggttacaggcatgagccactgtgcccagcccaggctctgggaatattgagataaataagatgcttctatccatttattcaagcacatattggtcacctactgtgtgcctggcactcatgtcacaaagataagttcctgattcggtacacttactgagcacctgctgtgtgcagggagctgagctatgggatgggaatgggagtaaacaaggtacttttcacttttttctttttttcctcactgctagacggtgtgggaacttctcactcattggcttctttcccacacacctgaagagcactgactgtgtgccgggcactagtgatacaaaagagtgtgacagttgttcagtctgcattttcgatcatgggctacatgccgagtgctggggcacagagatgaacaagatcggttccttcacttcttcatgccacaagtgtttattgagcacctgtgtgccaggcctcacagactcccagttgggttgaagaatggttgactgagtttgattcttcctgtaccctcggtcgtctgagctgtgtgcagacaacatccccccaccacccaagagggagggtagctcttccgccaccaggggcaagcacaggtcctggtggccccacgccacatgttagcccccctggagggggcgccagttggagacgggggctgggtgtccctggcccactcccagtcccctgtgctttacctccttgcccttgtgtctcaggtgtggtccctgcctgcttgatgaagttgctctgttcaagcctttggtgggatcatgtgtttgggggcttttaggggacccagctgcactggggcactgcccgtggcctgggtaggacatttcccagcaagggctggaggagttgccgtgccttcagcctgaatcgaatgtcagaaccagccagcggtgcttcaccctcttggggataacttgcttagttttttaataaatgttcctggttggttttcacagca

SEQ ID NO: 698 - DNA, 4509 bp, Homo sapiens
gcgggcggagcgggaggcggccacgtccccggcgggcctgggcgcggggaggcccggccccctgcgagcgcgccgcgaacgctgcggtctccgcccgcagaggccgccggggccgtggatggggagggcgcgccgcccggcggtcccagcgcacaggcggccacgatgagggtcaacgagaagtactcgacgctcccggccgaggaccgcagcgtccacatcatcaacatctgcgccatcgaggacatcggctacctgccgtccgagggcacgctgctgaactccttatctgtggaccctgatgccgagtgcaagtatggcctgtacttcagggacggccggcgcaaggtggactacatcctggtgtaccatcacaagaggccctcgggcaaccggaccctggtcaggagggtgcagcacagcgacaccccctctggggctcgcagcgtcaagcaggaccaccccctgccgggcaagggggcgtcgctggatgcaggctcgggggagcccccgatggactaccacgaggatgacaagcgcttccgcagggaggagtacgagggcaacctcctggaggcgggcctggagctggagcgggacgaggacactaaaatccacggagtcgggtttgtgaaaatccatgccccctggaacgtgctgtgcagagaggccgagtttctgaaactgaagatgccgacgaagaagatgtaccacattaatgagacccgtggcctcctgaaaaaaatcaactctgtgctccagaaaatcacagatcccatccagcccaaagtggctgagcacaggccccagaccatgaagagactctcctatcccttctcccgggagaagcagcatctatttgacttgtctgataaggattcctttttcgacagcaaaacccggagcacgattgtctatgagatcttgaagagaacgacgtgtacaaaggccaagtacagcatgggcatcacgagcctgctggccaatggtgtgtacgcggctgcatacccactgcacgatggagactacaacggtgaaaacgtcgagttcaacgacagaaaactcctgtacgaagagtgggcacgctatggagttttctataagtaccagcccatcgacctggtcaggaagtattttggggagaagatcggcctgtacttcgcctggctgggcgtgtacacccagatgctcatccctgcctccatcgtgggaatcattgtcttcctgtacggatgcgccaccatggatgaaaacatccccagcatggagatgtgtgaccagagacacaatatcaccatgtgcccgctttgcgacaagacctgcagctactggaagatgagctcagcctgcgccacggcccgcgccagccacctcttcgacaaccccgccacggtcttcttctctgtcttcatggccctctgggctgccaccttcatggagcactggaagcggaaacagatgcgactcaactaccgctgggacctcacgggctttgaagaggaagaggatcatcctagagctgaatacgaagccagagtcttggagaagtctctgaagaaagagtccagaaacaaagagactgacaaagtgaagctgacatggagagatcggttcccagcctacctcactaacttggtctccatcatcttcatgattgcagtgacgtttgccatcgtcctcggcgtcatcatctacagaatctccatggccgccgccttggccatgaactcctccccctccgtgcggtccaacatccgggtcacagtcacagccaccgcagtcatcatcaacctagtggtcatcatcctcctggacgaggtgtatggctgcatagcccgatggctcaccaagatcgaggtcccaaagacggagaaaagctttgaggagaggctgatcttcaaggctttcctgctgaagtttgtgaattcctacacccccatcttttacgtggcgttcttcaaaggccggtttgttggacgcccgggcgactacgtgtacattttccgttccttccgaatggaagagtgtgcgccagggggctgcctgatggagctatgcatccagctcagcatcatcatgctggggaaacagctgatccagaacaacctgttcgagatcggcatcccgaagatgaagaagctcatccgctacctgaagctgaagcagcagagcccccctgaccacgaggagtgtgtgaagaggaaacagcggtacgaggtggattacaacctggagcccttcgcgggcctcaccccagagtacatggaaatgatcatccagtttggcttcgtcaccctgtttgtcgcctccttccccctggccccactgtttgcgctgctgaacaacatcatcgagatccgcctggacgccaaaaagtttgtcactgagctccgaaggccggtagctgtcagagccaaagacatcggaatctggtacaatatcctcagaggcattgggaagcttgctgtcatcatcaatgccttcgtgatctccttcacgtctgacttcatcccgcgcctggtgtacctctacatgtacagtaagaacgggaccatgcacggcttcgtcaaccacaccctctcctccttcaacgtcagtgacttccagaacggcacggcccccaatgaccccctggacctgggctacgaggtgcagatctgcaggtataaagactaccgagagccgccgtggtcggaaaacaagtacgacatctccaaggacttctgggccgtcctggcagcccggctggcgtttgtcatcgtcttccagaacctggtcatgttcatgagcgactttgtggactgggtcatcccggacatccccaaggacatcagccagcagatccacaaggagaaggtgctcatggtggagctgttcatgcgggaggagcaagacaagcagcagctgctggaaacctggatggagaaggagcggcagaaggacgagccgccgtgcaaccaccacaacaccaaagcctgcccagacagcctcggcagcccagcccccagccatgcctaccacgggggcgtcctgtagctatgccagcggggctgggcaggccagccgggcatcctgaccgatgggcaccctctcccagggcaggcggcttcccgctcccaccagggcccggtgggtcctgggttttctgcaaacatggaggaccactttctgataggacattttcctttcttctttctgttttctttcccttgtttttgcacaaagccattatgcagggaatattttttaatctgtagtattcaagatgaatcaaaatgatggctggtaatacggcaataaggtagcaaaggcaggtgctttgcagaaagaatgcttggaaacttgagtctccctagaggtgaaaagtgagcagaggcccctagaaaccctcctctgaatcctcctaattccttaagatagatgcaaaatggtaagccgaggcatcgcgcaaaagctggtgcgatgcttcagggaaaatggaaaacccacgcaagaataatgattgattccggttccaaaaggtgtcacctacctgtttcagaaaatgcctcatccctgagccacacagggggcgtgggagcatcccagttatccctggaaagctagaaggggacagaggtgtccctgattaagcaggaaacagcacccttggcgtccccagcaggctccccactgtcagccacacacctgcccccatcacaccaagccgacctcagagttgttcatcttccttatgggacaaaaccggttgaccagaaaatgggcagagagagatgacctcggaagcatttccacagatggtgtcagggtttcaagaagtcttagggcttccaggggtcccctggaagctttagaatatttatgggtttttttttcaaatatcaattatatggtagattgaggattttttttctgtagctcaaaggtggagggagtttattagttaaccaaatatcgttgagaggaatttaaaatactgttactaccaaagatttttattaataaaggcttatattttggtaacacttctctatatttttactcacaggaatgtcactgttggacaattattttaaaagtgtataaaaccaagtctcataaatgatatgagtgatctaaatttgcagcaatgatactaaacaactctctgaaatttctcaagcaccaagagaaacatcattttagcaaaggccaggaggaaaaatagaaataaatttgtcttgaagatctcattgatgtgatgttacattccctttaatctgccaactgtggtcaaagttcataggtgtcgtacatttccattatttgctaaaatcatgcaatctgatgcttctcttttctcttgtacagtaagtagtttgaagtgggttttgtatataaatactgtattaaaaattaggcaattaccaaaaatccttttatggaaaccatttttttaaaaagtgaatgtacacaaatccacagaggactgtggctggacattcatctaaataaatttgaatatacgac

SEQ ID NO: 699 - DNA, 11116 bp, Homo sapiens
gaaattttaatttattattcccccctttttttcctgcatctataggataatattgtaaaatagcaattgaaaccaataatcattaaataaatatcaaggaaaatccaagcaaagctttctttttgttggactagtggtgtggtgtttggagacagtctctgaatgtgaacaggaaagcacccatcagcaaaacacgatcactctctagggagacagctgggggaatctgactctggcttctgcttttgttttaagggattaacttccctgtcaagtccaagaagacttgcgtatgagaagattacctgatggacttaattctaagattagcttttttcatcaagatggaaaaagatctttaggagcagaaaaggggagtgctaactgggggagcgagaagggagacgagcaaaagaaacaaaatcttgccacgtggctctgttttgtcagcaagaggatttaagactcacccagggcaaacactgggaccactgtaagagcgctggaacattctgcctcttgagtgaaggggccttctttctagcctctatggcactgaggggtgcgccggctggtggaggagtagtccgatggagccctgcgttccccggggacacagggccaagctttgaggtggaaagtttctggttctgaaacaacaaggagagagtctgtttttcttcctaaaatttggactcttgtctgcacaaactctggtctgttttgcacggtttgtgtgcctttttttccctttatgcaatctttttcagctttagcagcagaaatttgtctagttcaggaaacatgctagagggtggcttcagaaggaagatgatcctgtgtattctgtctctgcatccgaacttttgaagagaaaaattcgagctagagggattcttaaagccttaagttacttgaaatctatgtatttgcaaccctttgtctctggaatcatattacactaaactggaatctcaggctgaatgagaataaccaagtggagtaaaaagaagaaaaccgtttcttgatcaccacttaattaacgatgctctttctccaaaggatcagcacgttcttcctctgagaacttgaaaatacaaatggaccccatgtttttttaagcattaccttttcttagaagactgccatcatcttttatagaggaattttttcactatgcattcggtggatctttataaaatactgaccttctaattagattcaggtcagtcttaattaaagggggaaaaaagcaacgcaagccaaccacaaaaacacatataccaatgaaagaaattggtttaaatttcacagcattaacattactttttaagtaaaacagttcattgaagaaagtatgtatgcagcagtggaacatgggcctgtgctttgcagtgactccaacatcctgtgcctgtcctggaaggggcgtgtccccaagagtgagaaggagaagcctgtgtgcaggagacgctactatgaggaaggctggctggccacgggcaacgggcgaggagtggttggggtgactttcacctctagtcactgtcgcagggacaggagtactccacagaggataaatttcaacctccggggccacaatagcgaggttgtgctggtgaggtggaatgagccctaccagaaactggccacgtgcgatgcggacggaggcatattcgtgtggattcagtacgagggcaggtggtctgtggagctggtcaacgaccgcggggcgcaggtgagtgatttcacgtggagccatgatggaactcaagcacttatttcctatcgagatgggtttgtcctggttgggtctgtcagtggacaaagacactggtcatccgaaatcaacttggaaagtcaaattacgtgtggcatatggactcctgacgaccaacaggtgctgtttggcacggccgatgggcaggtgattgtcatggattgccacggcaggatgctggcccacgtcctcttgcacgagtcagacggtgtcctcggcatgtcctggaactacccgatcttcctggtggaggacagcagcgagagcgacacggactcagatgactacgcccctccccaagatggtccggcagcatatcccatcccagtgcagaacatcaagcctctgctcaccgtcagcttcacctcgggagacatcagcttaatgaacaactacgatgacttgtctcccacggtcatccgctcagggctgaaagaggtggtagcccagtggtgcacacagggggacttgctggcagtcgctgggatggaacggcagacccagcttggtgagcttcccaatggtccccttctgaagagtgccatggtcaagttctacaatgttcgtggggagcacatcttcacactggacactctcgtgcagcgccccatcatctccatctgctggggtcaccgggattcgaggctgttgatggcatcaggaccagccctgtacgtggtgcgtgtggagcaccgggtgtccagcctgcagctgctgtgccagcaggccatcgccagcaccttgcgtgaggacaaggacgtcagcaagctgactctgcccccccgcctctgctcctacctctccactgccttcatccccaccatcaagcccccaattccagatccgaacaacatgagagactttgtcagctacccatcagccggcaacgagcggctgcactgcaccatgaagcgcacagaggacgacccggaggtgggcggcccgtgctacacgctctacctggagtacctgggcgggcttgtgcccatcctcaaagggcggcgcatcagcaagctgcggccagagttcgtcatcatggacccgcggacagatagcaaaccagatgaaatctatgggaacagcttgatttctactgtgatcgacagctgcaactgctcagactccagtgacattgagctgagtgatgactgggctgccaagaaatctcccaaaatctccagagctagcaaatcacccaaactcccaaggatcagcattgaggcccgcaagtcacccaagctgccccgggctgctcaggagctctcccggtccccacggttgcccctgcgcaagccctctgtgggctcgcccagcctgactcggagagagtttccttttgaagacatcactcagcacaactatcttgctcaggtcacgtctaatatctggggaaccaaatttaagattgtgggcttggctgctttcctgccaaccaacctcggtgcagtaatctataaaaccagcctcctgcatctccagccgcggcagatgaccatttatctcccagaagttcggaaaatttccatggactatattaatttacctgtcttcaacccaaatgttttcagtgaagatgaagatgatttaccagtgacaggagcatctggtgtccctgagaacagcccaccttgtaccgtgaacatccctattgcaccgatccacagctcggctcaggctatgtcccccacgcagagcatagggctggtgcagtccctactggccaatcagaatgtgcagctagatgtcctgaccaaccagacgacagctgtagggacagcagaacatgcaggtgacagtgccacccagtacccagtctccaaccggtactccaatcctggacaggtgattttcggaagcgtggaaatgggccgcatcattcagaacccccctccactgtccctgcctcccccgccgcaggggcccatgcagctgtccacggtgggccatggagaccgagaccacgaacacctgcagaagtcagccaaggccctgcggccaacaccgcagctggcagctgagggggacgcagtggtctttagtgccccccaggaggtccaggtgacgaagataaaccctccacccccgtacccaggaaccatccccgctgcccccaccacagcagcacccccgccccctctgccgcccccacagcccccagtggatgtgtgcttgaagaagggcgacttctccctctaccccacgtcagtgcactaccagacccccctgggctatgagaggatcaccaccttcgacagcagtggcaacgtggaggaggtgtgccggccccgcacccggatgctgtgctcccagaacacctacaccctccccggcccgggtagctctgccaccttgaggctcacggccactgagaagaaggtccctcagccctgcagcagtgccaccctgaaccgcctgaccgtccctcgctactccatccccaccggggacccacccccgtatcctgaaattgccagccagctggcccaggggcggggggctgcccagaggtccgacaatagcctcatccacgctaccctgcggaggaacaaccgtgaggctacgctcaagatggcccagctggccgacagcccgcgggcccccctgcagcccctggccaagtccaagggcgggcccgggggggtggtgacacagctcccagcgcggcccccacctgccctgtacacctgcagtcagtgcagtggcacagggcccagctcacagcccggagcctccctggcccataccgccagcgcctccccgttggcctcccagtcctcctacagcctcctgagcccacccgacagcgcccgcgaccgcaccgactacgtcaactcggccttcacggaggacgaggccctgtcccagcactgtcagcttgagaagcccttgaggcaccctcccctgcctgaagctgctgtcaccctgaaacggccacccccttaccagtgggaccccatgctgggtgaggacgtttgggttcctcaagaaaggacagcacagacttcagggcccaaccccttaaaactgtcctctctgatgctgagtcagggccagcacctggacgtgtcccgactgcccttcatctcccccaagtctcctgccagccccactgccactttccaaacaggctatgggatgggagtgccatatccaggaagctataacaacccccctttgcctggagtgcaggctccctgctctcccaaagatgccctgtccccaacgcagtttgcacaacaggagcctgctgtggtccttcagccgctgtacccacccagcctctcctattgcaccctgccccccatgtacccaggaagcagcacgtgctctagtttacagctgccacctgtcgccttgcatccatggagttcctacagcgcctgcccgcccatgcagaacccccagggcactctccccccaaagccacacttggtggtggagaagccccttgtgtccccaccacctgccgacctccaaagccacttgggcacagaggtgatggtagagactgcagacaacttccaggaagtcctctccctgaccgaaagcccagtcccccagcggacagaaaaatttggaaagaagaaccggaagcgcctggacagccgagcagaagaaggcagcgttcaggccatcactgagggcaaagtgaagaaggaggctaggactttgagtgactttaattccctaatctccagcccacacctggggagagagaagaagaaagtgaagagtcagaaagaccaactgaagtcaaagaagttgaataagacaaacgagttccaggacagctccgagagcgagcctgagctgttcatcagcggggatgagctcatgaaccagagccagggcagcagaaagggctggaaaagcaagcgctccccacgggccgccggcgagctggaggaggccaagtgccggcgggccagtgagaaggaggacgggcggctgggcagccaaggcttcgtgtacgtgatggccaacaagcagccgctgtggaacgaggccacccaggtctaccagctggacttcggggggcgggtgacccaggagtccgccaagaacttccagattgagttagaggggcggcaggtgatgcagtttggacggattgatggcagtgcgtacattctggacttccagtatccgttctcagccgtgcaggcctttgcagttgccctggccaacgtgactcagcgcctcaaatgaagagactggtgtggggaggagagagatgcagagagcctttggaagaggtcttcggagatgccagaggagccctctaggggtccgatgcctgggaggaccagaagccaacagcaaaactggaaaagcccggcaggcccaggagagggcgctgacctgtggtcgtcatttatttggttgggttttattaccttttattgtctgttcttcttttcttctttcatttcagtggcatttggaagcaaagagtgctaggcacctgctgttctttcaggaaacagcttggctgtggtaatgctctactgggcccttcagaatgaagacagtctgccttagagcctgctattcttttagacatagggaggatgcattatcctgtattctcctccaacatcaccactagcgtaaaagcaaaaagcttttacaaaacacagccaaaaattctcaagatgcaggttcttggggaatgggatggggacagcatttgatttacactgattatgttactccccaaaaggtgacttaattaataaagggcatttgggcagacacactgtgttggaccaacaaagtaggctctttacaggggtgttctcaccaggtagaaatgcgatttgctcactgaggatgttggggaagggacgaagggtaaagaagaaactgcacgtatacacaggttcacatcactctgcagacagcaatgtgactcagcgtgtgacttgtagcagcagtacgagggctacactcctctgctgaggatgtctacattgaaagcctccactagtttcatcgtttgtcaaagttccgtaggatcagtgatggtcattcagcatgactggttctgggagaaggtgagagacaaaaatggaaagatcctggcctgtggtagtggtagcagttttctcaaataatgtggtgacagtcactagatcctcacatgctgagaaacagcctctactctctctgccccttttactttttaatctggaatgcattactgtaaacatgatctttcccatgagataccatgttctatgccttcccattctaaaagtgtggacaacgcttgatttgaaaccactccttttctcctcttggctacattaaaattcagttgactacaaatgctttctatcaaattagaaatgtaaccaaaaaaatgttaagtgttcaccagggtattaaaatacagaggagtatggtcaaatctttgacaaaattttcatgatcttctctaacaaaaaaagttgtttattaactgtacagactgtttactaaggagctaaaccactgagaaaacgttattaaaattgtaatacctaggtagttggttgatcacagtttgttaattgtataaaaaaaaattacctagaatatctcttcccacttcctcgtcctcgtgagaacctgtgggcagtattcaagccctgatgacaaaacccagtgttttttgttgttgttttttgttgttgttttttgtttttgtttttgtttttctcagtcttacctgtgatgttgtttaggatcaggcccctctcctgggcctgctgtgcaggagcacaggaactatctgctggcgttgggttccaaatttgcattttatttggaaacagacaagtagaagatgctacagaaaagtattttcaaatttaaacgttttttaatcccctgttttagttaaaaaattggaaaagaaaccgacccatttttttcccagatcaagatgacatgacatcactcccaattctctccaaaccccagagaaatactgacgaagttttctgatgtggcaaaggatatttcccatctaataccagtttctcatttatatttaacgtattggacctgatatttttagtgggtgcattcttccagaaagaattcagcaatgttatcagaattaattcttttatatgagtttatgtagcttgatatggtgtttcagtgcttattggttgtgcaataatggttatagcctgttagataatctaaatgcaattcccctgttttgtcgtttaggagataattatttatcttgcttttcatagtgttcttaggaattattttgttgttacgttttggtgagttatacccattttatttatttagaaaaatagtatctttgttaacgacttacatggtcacagtatattttgctgcaagaaataaagaggatatgatagaaggtttttttttttttttttttttttttttgagacggagtcccactcttgtcgcccaactagagtgtagtggcacaatctcggctccccacaacctctgactccagggttcaggtgattattttgcctcagcctcccaagcagctgggattatagacacccgccaacacgccaggctaatgtttttgtatttttaatagagatggggttttgccatgttggccaggctggtcttgaactcctgacctcaggtgatccgcccgcctcggcctcccaaagtgctgggattacagacgtgagccaccactcccggcccatagaaggttttttgctggataatttgtaacttttctaattgggaaaaaattcctattaatcacttaaaaatttttttttgtattttgtgttattgattatatacaaaggagactttttttttgagataacactcaaatagtattctcttcttttgaaaattttatttttatctgaaaataacagttgatctgaaataaaaaggggagacctattagaatgagagtagccaaggaaagagttactaggtaataagcttcactttttgtgttctaattgtttttgagatataaagaccctgaaaaagcccattttagaacctgtttaataagagcaaatataggggaaaatctttgaaatgaaagctacaaatacatgtgagaagaaaaaaatggatttttttagcaaataattaactaagcttctaaatgcctagctccctcccccaaaggcgctttcccccgatggaggcacaggcttctgtctcggatgtttggcgcacgtgagtttgtatgagtttgtaccggagtgaccccggcagccactgcccacctcccctctacccaggggcctgaaaagaggggctgccctcctgcgccaaggcagacacaagctgcgggctgtgcggtcctagtagtgtgacgtttcagttaatagtggtggtcttattttcaactatgctttcagtctctgttgactaaatacgacgaaaattcatactttatgcaggagatttctaaaaatttaatgtttattaatagtttatgaatatcaagatacctcattgaatccctaaatttaaaagcagtccagtaaaaggttaactgtataaagaatctatgactttttgagggaagtgtgatatattaacaaatataaccaattctaaatttgttttagctctaacctcatcaaaccaaaggcacagatttgtgtacaatatacccattgaatgtatatcctgagaaaaattggggccaaagaagcaggaaaatctcaaagctctaatggcagcataaatcaaagaatttcacaggctagtgtttttatccatagccattgctcccttgtcaagtgtctcacaaggacatggaagaatgtgttatgttcatcttgtaatcatagcaaaaagtctgcaaaccccagggtcaagcctgctctgccacagggttggatggtgaccttgggcaagtccctggggctggctaggcctccacttgtccatctgtgaaatgaaaggatcagcctggacagccctctaaactcccttacagctctcagcctaagagcgcagcactgaacagcctcatcattccacttttcatgggaaatatatttcacaccattgcctttgtgtagagaaatatttcttttcctgtgttaatgagctatgtactgaatataaaccagtgcatttaaagtaatatcttttgtgcacctctaaatgtgtttggaattgtgtttgttctcatagaatatacaaaagtactgattctaggtaagaaggagtctccacgggtgtgccctgctcagctggatgtccatgagaacagccatgaaataagtcactacttgtccccaaaaccacaggaatatatacctaggtcacctcaaattcctgagtgtgctctgccatgttacacggtcttcaaattgaaaaggtttcttgaaaaggaaagtttggcccagcaactggagaaggagtccatggtgtcgctgtgtgcctgtatcatttggccaagtcaatggttgtaagcaaagttagtggagacaaaaatgtgtccaaaatgtcgtttgagttcctgggatttctgtaatagcacacaactcagaactcttcagcatttgtgtgattccttacctctggctgataaaactctaatgggttgtggcttactttgtttccattttctttggctttgtgcaatttttgtgtaactttacttgtacctatattttctgtttacagttctttttaaggggaggggtagggttctaagatcttgttgtttattgtagataaaaattttttcgtgttgtagaaaagcatgggttatgcgtttgactgaaaaagacactgtattatttaccaaaggggtattgtttttgcatttgtttataaatgcattattttggtactgtaaatttggacataatttctgagtttattactactggcattttctttttccctttttttttttttttaaccgtaagtgcacgatgcaggtgcataggccccagaccaaactagaccaccagcatgttcatgtccagacctcggcagtggcgtgcactgcttgtgcacctcagttcctccagtgttggtttgtttgttttttaattcagcatcctgctggttttactttccaagcaagatctgttgcgactcccaaatgcgttttaatgagctcatccttatttgcctttcttcttacgtattttgtgtattagattgtgcaggagatattctagaaggcattaatggtttgcattcaaaacgatgtggtttgtccaagttattttctgtctttattactgagacggattaatctccttatttttttcttgatgatttgaagttgtaacagttgtccagctattgcttaataaaattttgcagatcaaaaaa

SEQ ID NO: 700 - DNA, 1743 bp, Homo sapiens
atgattatctcaatagatgcagagaaggcctttgacaaaattcaacagcccttcatgctaaaaactctcaataaattagggattgatgggacgtatctcaaaataataagagctatctatggcaaacccacagccaatatcatactgaatgggcaaaaactggaagcattccctttgaaaactggcacaagacagggatgccctctctcatcactcctattcaacatagtgttggaacttctggccagggcaatcaggcaggagaaggaaataaagggtattcagttaggaaaagaggaagtcaaattgtccttgtttgcagatggcatgattgtatatctagcaaaccccatcgtctcagcccaaagtctccttaagctgataagcaacttcagcaaagtctcaggatacaaaatcaatgtgcaaaaatcacaagcattcttatacgccaataacagacaaacagagagccaagtcatgagtgaactcccattcacaattgcttcaaagagaataaaatacctaggaatcgaacttacaagggatgtgaaggacctcttcaaggagaattacaaaccactgctcaatgaaataaaagaggatacaaacaaatggaagaacattccatgctcatggataggaagaatcaatattgtgaaaatggccatactgcccaagctgggtaagaattttctttgtataaatggtaaatccaggaaagagtacaagtttttgatctgtcactttcaaaactgccaagcacctcagcatttctatgagctttttagatcttctgccttgtcccaatctgaggacgctgaggaagagcttgcaagaaaagacggtctggagtggacctccaagcaaactccagcagacctgcagcagaggggcttaactgttagaagaaaaactaacaaacagaaaggaatagcatcaacatcaacaaaaaggatgtccatgcaaaaaccccatccaaacgtccctaacatcaaagaccaaagaattaggaaaaactacttcaaatttcatatggaaccaaaaaaagcccatatagccaagacaatcctaagcaaaaagaacagagctggaggcatcaagctacctgatttccaactatactacgaggctacagtaatcaaaacagcatggtactggtaccaaaccagatacatagaccaatggaacagaacaaaggcctcagaaataacatcacacatctacaaccatctgatctttgacaacccttacaaaaacaagcaatggggaaaggacttcctatttaataaatgctgttgggaaaactggctagccatgtgcagaaaactgaaactggaccccttctttacaccttacacaaaaattaactcaagatggaataaagacttaaagctaagacctaaaaccataaaaaccatagaagaaaacctatgcaataccattcaggacataggcatgggcaaggacttcatgactaaaacaccaaaagcaatggcaacaaaagccaaaattgacaaatgggttctaattaaactgaagatcttctgcacagcaaaagaaactattgcgggatctggccagcagcctgcaatgcactggggctctctctttgttcccaggtggatcggcaggtcgagaaataatagacacacacaagatagtgaaagctgggtccaggggggtaaccgccttctggtcacatggtgccgccaatgcactggatataccagcatttattactaa

SEQ ID NO: 701 - DNA, 6300 bp, Homo sapiens
gcgacggcggcggcagcggcggcggtgatggctcctccgggctgcccgggttcgtgccccaacttcgccgtagtctgctccttcttggagcgctacgggccgctgctagacctgcctgagttgccgttccctgagctggagcgggtgctgcaggcgccgccgccggacgtcggcaacggagaagtaccaaaagaattggtggagctccatttgaagctgatgaggaaaattggcaaatctgttactgcagacagatgggaaaaatatttgatcaagatatgccaagagtttaacagtacctgggcatgggagatggagaagaagggctatcttgaaatgagtgttgaatgcaaactagcactcttaaagtacctctgtgagtgtcagtttgatgacaatctcaaattcaagaatattattaatgaggaggatgccgatactatgcgtctccagccaattggtcgagacaaagatggcctcatgtactggtaccaattggatcaagatcacaatgtcagaatgtacatagaagaacaagatgatcaagatggctcttcatggaaatgcattgtcagaaatcgaaacgagttggctgagactcttgcactcctgaaagcacaaattgatcctgtactattgaaaaactctagccaacaagacaactcttctcgggaaagtcccagcttagaggatgaggagactaaaaaagaggaagaaacacctaaacaagaggaacagaaagaaagtgaaaagatgaaaagtgaggagcagcctatggatttagaaaaccgttctacagccaatgttctagaagagactactgtgaaaaaagaaaaagaagatgaaaaggaacttgtgaaactgccagtcatagtgaagctagaaaaacctttgccagaaaatgaagaaaaaaagattatcaaagaagaaagtgattccttcaaggaaaatgtcaaacccattaaagttgaggtgaaggaatgtagagcagatcctaaagataccaaaagtagcatggagaagccagtggcacaggagcctgaaaggatcgaatttggtggcaatattaaatcttctcacgaaattactgagaaatctactgaagaaactgagaaacttaaaaatgaccagcaggccaagataccactaaaaaaacgagaaattaaactgagtgatgattttgacagtccagtcaagggacctttgtgtaaatcagttactccaacaaaagagtttttgaaagatgaaataaaacaagaggaagagacttgtaaaaggatctctacaatcactgctttgggtcatgaagggaaacagctggtaaatggagaagttagtgatgaaagggtagctccaaattttaagacagaaccaatagagacaaagttttatgagacaaaggaagagagctatagcccctctaaggacagaaatatcatcacggagggaaatggaacagagtccttaaattctgtcataacaagtatgaaaacaggtgagcttgagaaagaaacagcccctttgaggaaagatgcagatagttcaatatcagtcttagagatccatagtcaaaaagcacaaatagaggaacccgatcctccagaaatggaaacttctcttgattcttctgagatggcaaaagatctctcttcaaaaactgctttatcttccaccgagtcgtgtaccatgaaaggtgaagagaagtctcccaaaactaagaaggataagcgcccaccaatcctagaatgtcttgaaaagttagagaagtccaaaaagacttttcttgataaggacgcacaaagattgagtccaataccagaagaagttccaaagagtactctagagtcagaaaagcctggctctcctgaggcagctgaaacttctccaccatctaatatcattgaccactgtgagaaactagcctcagaaaaagaagtggtagaatgccagagtacaagtactgttggtggccagtctgtgaaaaaagtagacctagaaaccctaaaagaggattctgagttcacaaaggtagaaatggataatctggacaatgcccagacctctggcatagaggagccttctgagacaaagggttctatgcaaaaaagcaaattcaaatataagttggttcctgaagaagaaaccactgcctcagaaaatacagagataacctctgaaaggcagaaagagggcatcaaattaacaatcaggatatcaagtcggaaaaagaagcccgattctccccccaaagttctagaaccagaaaacaagcaagagaagacagaaaaggaagaggagaaaacaaatgtgggtcgtactttaagaagatctccaagaatatctagacccactgcaaaagtggctgagatcagagatcagaaagctgataaaaaaagaggggaaggagaagatgaggtggaagaagagtcaacagctttgcaaaaaactgacaaaaaggaaattttgaaaaaatcagagaaagatacaaattctaaagtaagcaaggtaaaacccaaaggcaaagttcgatggactggttctcggacacgtggcagatggaaatattccagcaatgatgaaagtgaagggtctggcagtgaaaaatcatctgcagcttcagaagaggaggaagaaaaggaaagtgaagaagccatcctagcagatgatgatgaaccatgcaaaaaatgtggccttccaaaccatcctgagctaattcttctgtgtgactcttgcgatagtggataccatactgcctgccttcgccctcctctgatgatcatcccagatggagaatggttctgcccaccttgccaacataaactgctctgtgaaaaattagaggaacagttgcaggatttggatgttgccttaaagaagaaagagcgtgccgaacgaagaaaagaacgcttggtgtatgttggtatcagtattgaaaacatcattcctccacaagagccagacttttctgaagatcaagaagaaaagaaaaaagattcaaaaaaatccaaagcaaacttgcttgaaaggaggtcaacaagaacaaggaaatgtataagctacagatttgatgagtttgatgaagcaattgatgaagctattgaagatgacatcaaagaagccgatggaggaggagttggccgaggaaaagatatctccaccatcacaggtcatcgtgggaaagacatctctactattttggatgaagaaagaaaagaaaataaacgaccccagagggcagctgctgctcgaaggaagaaacgccggcgattaaatgatctggacagtgatagcaacctggatgaagaagagagcgaggatgaattcaagatcagtgatggatctcaagatgagtttgttgtgtctgatgaaaacccagatgaaagtgaagaagatccgccatctaatgatgacagtgacactgacttttgtagccgtagactgaggcgacacccctctcggccaatgaggcagagcaggcgtttgcgaagaaagaccccaaagaaaaaatattccgatgatgatgaagaggaggaatctgaggagaatagtagagactctgaaagtgacttcagtgatgattttagtgatgattttgtagaaactcggcgaaggcggtcaaggagaaatcagaaaagacaaattaactacaaagaagactcagaaagtgacggttcccagaagagtttgcgacgtggtaaagaaataaggcgagtacacaagcgaagactttccagctcagagagtgaagagagctatttgtccaagaactctgaagatgatgagctagctaaagaatcaaagcggtcagttcgaaagcggggccgaagcacagacgagtattcagaagcagatgaggaggaggaggaagaggaaggcaaaccatcccgcaaacggctacaccggattgagacggatgaggaggagagttgtgacaatgctcatggagatgcaaatcagcctgcccgtgacagccagcctagggtcctgccctcagaacaagagagcaccaagaagccctaccggatagaaagtgatgaggaagaggactttgaaaatgtaggcaaagtggggagcccattggactatagcttagtggacttaccttcaaccaatggacagagccctggcaaagccattgagaacttgattggcaagcctactgagaagtctcagacccccaaggacaacagcacagccagtgcaagcctagcctccaatgggacaagtggtgggcaggaggcaggagcaccagaagaggaggaagatgagcttttgagagtgactgaccttgttgattatgtctgtaacagtgaacagttataagactttttttccatttttgtgctaatttattccacggtagctctcacaccagcgggccagttattaaaagctgtttaatttttcctagaaaactccactacagaatgacttttagaagaaaaatttcaacaaatcctgaagtctttctgtgaagtgaccagttctgaactttgaagataaataattgctgtaaattccttttgattttctttttccaggttcatggtccttggtaatttcattcatggaaaaaaatcttattataataacaacaaagatttgtatatttttgactttatatttcctgagctctcctgactttgtgaaaaagggtggatgaaaatgcattccgaatctgtgagggcccaaaacagaatttaggggtgggtgaaagcacttgtgctttagctttttcatattaaatatatattatatttaaacattcatggcatagatgatgatttacagacaatttaaaagttcaagtctgtactgttacagtttgagaattgtagataacatcatacataagtcatttagtaacagcctttgtgaaatgaacttgtttactattggagataaccacacttaataaagaagagacagtgaaagtaccatcataattaacctaaatttttgttatagcagagtttcttgtttaaaaaaaaataaaatcatctgaaaagcatttgtacagtaaaatgtataatgaagctttgccaaccagactgtgctagcaacaaatttttttaaataagctttatgcagtggtaataaggtggcctcaaatatattgtgtctgatggagagttattagtgaaatgaatgtggtctttcttaaggcctgggtggactgtaaactttgccaatagtataactcttgtcttctggccacttgatgtttaaatatctgaaatatcattttgaaaaaaatacatctatatataacatacatgaagagatgctaagctgacagtgatattttagcacatttgaagactgggaagagattttcaggtgaattttaactggtctattcttgcccttagtatctacttcaaattgaagtctacaaacaaagcagttcctttgggaggtttttagtttgagttttagcgtgtgtgtgtgtttgtgtgtgtgcgtgtgcgtgtgtgtttgtgttggaatttcctatctgcctggatatattagcagagtttgaatgtagttttggcctttggccattagacttctattaaaattcattaatagtcatacaaccaacatagagttgaatgagaactgccgatgtaattaataggcatgacatccatttcaaacatctcaacactttaaagaaaagccctttgtttcaagaaaaaagggtttgtaactaactaaatacctaacatgtaattgacactaaaatatgaactttgtcttatttagtttctgttatagctgtaaaatttcaggcagagccataacattgtacagagtgtagcacttgtgattaaacctagcctgttaaatcctgaaaccttcaaccattacttctgtgaatactttagccctgggatttgggtttttctgttccggtgttgtgtctgttgccggcaatggacacaccatatctgctgctggcccaaggaacgtcattaatttttctttccaaattaagtattatgtgctagtcagtgtatagtaaagcacttctcttttttattactaaaaagctggcattagatttgcattataaatacctctctaggaactttatactccttttccttcttcaacaggtattgcccttaaatcttatcttttggccttgaaagtttatagctattgtttttcagttgttcgttgttttgttttgtttcactttagttctgtagtacctgcccattaatatttttgctttgattctagcaatgtgtatgtatctgtataaaaaataaaataatgaaagcaacctaaaaataggatgcaccaata

SEQ ID NO: 702 - DNA, 2540 bp, Homo sapiens
aaacaaaacctggaagcatctcaagtgcctaccagcaggaggatggctacactgccatacgttttcacaatggactatgcataacagtacttccccacagccacacatggcaacgtcaagaagtctctgctgagtggaaaagcaagtctcaaaagattgcacagagtatgctgctcctgtttgttttatatagtgcaaaaacaaccaaaactaaacaaaacattgtttaggcagtcatatatatgtgatcaaactactttcagaaagagcaaagggataataaacataaaattcatttttttttttttttttgagatggagtctcgctctgtcgcccaggctggagtgcagtggcgcaatctcagctcactgcaagctccgcctcccgggttcatgccattatcctgcctcagcctcctgagtagctgggactataagcgcccaccaccatgcccggcgaatttttttgtatttttagtagagacagggtttcaccgtgttagccaggatggtctcgatctcctgaccttgtgatctgcctgcctcgacctcccaaagtgctgggattacaggtgtgagccaccacgcctggcacataaaattcaaaccagaggttacctggagggagagaggcagggaggagcacgtggatagacatatattcagattattagatatcaggtttacagatactcattttattaagaaggaattaatgaataaaacacagagagaaaagagggtcacgcatctaccaaatatgacatgaagggttttgattagctaaaaatggacagtcaagaaggcagagggtcaaaagatgtagatggccatcagttaaaaagacaggcactcaggtccagctctaggaagagaaataaactaacagatacctatgcaggcattggcaaagcaaagagactttcctttcctttgttgagctgaaggcgagggtggtgaattcctgtttgtttttggatccctgccttgcctcacaccaggacccagtgtgtggtcccacgtccttagatacgtatgcctggtcagggtactagtctcaattaaaagcaactgcaacatcagtcccaatccatagtgcccacggccaacatagaggctgagggtgaagctaagaagaaaaagaggcgcgagctaaccctaaagagcacagtggcactcctccgtggcctctgctccaacccaggtgtgctccgcgaggccacaggtgagactccccagaggcccgttcctaatggggtctacaaagaatgcacaagggaggctcagagacatttacagttaggctcaaaataaccgtgagggccagctgtgccttccagccgagccacctccaaaattctaggtgggaccatggatagcgcagcttgctacagcccagctaacttctccagggaaagtgagggtgggaaaaaataaatcacaaatatttactgttggccaggcacagtggctcaagcctggaatccaagcaccttgggagggcaaggtgggaggatcccttgaacccagctgtttgagaccagcctgagcaacagagagactctatctctacaaaaaaaaatttaaaaattagctgggcgtggtggcttgaacctgtggtcccaactacttgggaggctgaggtggggggatcgcttgagcccacgaagccaaaggctgcagtgagccatgatcataccactgcactccagccttggtggcagagtaagagcctgtctcaaaaaataaaataaaataaaaatatatttattgttgctttaaaaagcagaaacaggctgggtgtggtggctcacacctgtaaccccagcactttgggaggccaaggtgggaagattgcttgagcctcagaggttgagaccagcccgggcaacatggtgaaaccccatctctaataaaaatacaaaaattagtgcttcctccagtccgtgcctccaatatgatgaaaaaaagaaggaacaacggtcgtaccaaaaagggccgcggccacgtgcagcctatttgcgacacgaactgtgcccaatgtgtgcccaaggacaaggctattaacaaattcatcattggaaacacagtggaggctgcagcagtcagggacatttctgaagcgagcgtctttgatgcctatgtgcttcccaagctgtatttgaagctacattactgtctgagttgtgcaattcacagcaaagtagtcaggaatcgatcttgtgaagcccacaaggactgaacacccctactccaatttagacctgcggatgctgccccacaacccccaccaaagcccacgtaaggagttgagtccttaaagtctgaagacggactattctcttgagaaaaataaaatggaaattgtacttaattaaaaaatacaaaaagtagccatgagtggtgacatgcacctgtggtcccagctacacgcaggggctgaagtgtgaggatcacctgagcttggggggttgagactgcagtaaactgagatcacatcactgcactccagcctgggtgacagagtaaaaccttgtctc

SEQ ID NO: 703 - protein, 15 aa, Homo sapiens
GENYCFSVQAVIPSR

SEQ ID NO: 704 - protein, 17 aa, Homo sapiens
CFYTTDTECDLTDEIVK

SEQ ID NO: 705 - protein, 13 aa, Homo sapiens
STDSPVECMGQEK

SEQ ID NO: 706 - protein, 9 aa, Homo sapiens
DTEITCSER

SEQ ID NO: 707 - protein, 8 aa, Homo sapiens
GLEAICAK

SEQ ID NO: 708 - protein, 16 aa, Homo sapiens
DKLPQPVQPDPVSHCK

SEQ ID NO: 709 - protein, 7 aa, Homo sapiens
EVTVECK

SEQ ID NO: 710 - protein, 6 aa, Homo sapiens
IDCVSK

SEQ ID NO: 711 - protein, 19 aa, Homo sapiens
CFLAGNNFSPTVNLELPLR

SEQ ID NO: 712 - protein, 18 aa, Homo sapiens
NPMDYPVEDAFCKPQLVK

SEQ ID NO: 713 - protein, 7 aa, Homo sapiens
LLEADCR

SEQ ID NO: 714 - protein, 8 aa, Homo sapiens
DLLNCSFK

SEQ ID NO: 715 - protein, 9 aa, Homo sapiens
YNFFCQGTR

SEQ ID NO: 716 - protein, 7 aa, Homo sapiens
SLACQGK

SEQ ID NO: 717 - protein, 9 aa, Homo sapiens
DNWVFCGGK

SEQ ID NO: 718 - protein, 12 aa, Homo sapiens
TYILTCEHDVLR

SEQ ID NO: 719 - protein, 27 aa, Homo sapiens
ICISGDSAGGNLAAALGQQFTQDASLK

SEQ ID NO: 720 - protein, 10 aa, Homo sapiens
CLCAIDIHNK

SEQ ID NO: 721 - protein, 9 aa, Homo sapiens
ESVVDYCNR

SEQ ID NO: 722 - protein, 9 aa, Homo sapiens
AVDCLLDSK

SEQ ID NO: 723 - protein, 10 aa, Homo sapiens
CETQNPVSAR

SEQ ID NO: 724 - protein, 17 aa, Homo sapiens
YIFITGCDSGFGNLAAR

SEQ ID NO: 725 - protein, 6 aa, Homo sapiens
FENCNK

SEQ ID NO: 726 - protein, 16 aa, Homo sapiens
YLEGTSCIAGVLVPAK

SEQ ID NO: 727 - protein, 7 aa, Homo sapiens
TMLQCLK

SEQ ID NO: 728 - protein, 8 aa, Homo sapiens
LAEEESCR

SEQ ID NO: 729 - protein, 9 aa, Homo sapiens
TVVALCGQR

SEQ ID NO: 730 - protein, 10 aa, Homo sapiens
CVEENNGVAK

SEQ ID NO: 731 - protein, 5 aa, Homo sapiens
TECER

SEQ ID NO: 732 - protein, 11 aa, Homo sapiens
NLSGQPNFPCR

SEQ ID NO: 733 - protein, 17 aa, Homo sapiens
FKDDVMPATYCEIDLDK

SEQ ID NO: 734 - protein, 7 aa, Homo sapiens
IFQALCK

SEQ ID NO: 735 - protein, 11 aa, Homo sapiens
SETVLTCATGR

SEQ ID NO: 736 - protein, 7 aa, Homo sapiens
VLVCAHR

SEQ ID NO: 737 - protein, 13 aa, Homo sapiens
GHCVDLPDTGLCK

SEQ ID NO: 738 - protein, 10 aa, Homo sapiens
SIHDFCLVSK

SEQ ID NO: 739 - protein, 5 aa, Homo sapiens
CLLLK

SEQ ID NO: 740 - protein, 8 aa, Homo sapiens
CSVLFHLR

SEQ ID NO: 741 - protein, 8 aa, Homo sapiens
TAAVCVAK

SEQ ID NO: 742 - protein, 8 aa, Homo sapiens
FLTVLCSR

SEQ ID NO: 743 - protein, 11 aa, Homo sapiens
GGDEYDNHCGK

SEQ ID NO: 744 - protein, 10 aa, Homo sapiens
TFEVCDLPVR

SEQ ID NO: 745 - protein, 8 aa, Homo sapiens
SCAGISGK

SEQ ID NO: 746 - protein, 13 aa, Homo sapiens
DEVLYVFPSDFCR

SEQ ID NO: 747 - protein, 13 aa, Homo sapiens
CTTSILHNLSHHR

SEQ ID NO: 748 - protein, 23 aa, Homo sapiens
VLSVCPSNKPAIVEAGGMQALGK

SEQ ID NO: 749 - protein, 6 aa, Homo sapiens
DVSCSR

SEQ ID NO: 750 - protein, 8 aa, Homo sapiens
LLFVPCSR

SEQ ID NO: 751 - protein, 7 aa, Homo sapiens
ITEFCHR

SEQ ID NO: 752 - protein, 13 aa, Homo sapiens
FIITALPTIYHCK

SEQ ID NO: 753 - protein, 7 aa, Homo sapiens
CIDVHLK

SEQ ID NO: 754 - protein, 6 aa, Homo sapiens
ILTCPK

SEQ ID NO: 755 - protein, 10 aa, Homo sapiens
NQCTQVVQER

SEQ ID NO: 756 - protein, 19 aa, Homo sapiens
LLEAQACTGGIIHPTTGQK

SEQ ID NO: 757 - protein, 9 aa, Homo sapiens
YQAECSQFK

SEQ ID NO: 758 - protein, 7 aa, Homo sapiens
DILIACR

SEQ ID NO: 759 - protein, 12 aa, Homo sapiens
CVANNQVETLEK

SEQ ID NO: 760 - protein, 7 aa, Homo sapiens
IHDVLCK

SEQ ID NO: 761 - protein, 13 aa, Homo sapiens
VEGCFNQLLYDIR

SEQ ID NO: 762 - protein, 7 aa, Homo sapiens
SCEVPTR

SEQ ID NO: 763 - protein, 7 aa, Homo sapiens
CEESFVK

SEQ ID NO: 764 - protein, 7 aa, Homo sapiens
DSVICLK

SEQ ID NO: 765 - protein, 8 aa, Homo sapiens
LTCLQNLK

SEQ ID NO: 766 - protein, 9 aa, Homo sapiens
WSTAVEFCK

SEQ ID NO: 767 - protein, 18 aa, Homo sapiens
DCGLPPDVPNAQPALEGR

SEQ ID NO: 768 - protein, 19 aa, Homo sapiens
EIYCPAPPQIDNGIIQGER

SEQ ID NO: 769 - protein, 9 aa, Homo sapiens
ATVMFECDK

SEQ ID NO: 770 - protein, 8 aa, Homo sapiens
VLCTPPPK

SEQ ID NO: 771 - protein, 7 aa, Homo sapiens
SCPDAIK

SEQ ID NO: 772 - protein, 13 aa, Homo sapiens
LCSGVLGTVVHGK

SEQ ID NO: 773 - protein, 21 aa, Homo sapiens
QVCQLPGLFSYAQHIASIDGR

SEQ ID NO: 774 - protein, 8 aa, Homo sapiens
ETCISFIK

SEQ ID NO: 775 - protein, 7 aa, Homo sapiens
CSLIDKK

SEQ ID NO: 776 - protein, 19 aa, Homo sapiens
FVCMLVTEDNVFEAPTIVK

SEQ ID NO: 777 - protein, 6 aa, Homo sapiens
LLLCAR

SEQ ID NO: 778 - protein, 13 aa, Homo sapiens
SEGTYCCGPVPVR

SEQ ID NO: 779 - protein, 10 aa, Homo sapiens
DCLTESNLIK

SEQ ID NO: 780 - protein, 18 aa, Homo sapiens
VVSGMVNCNDDQGVLLGR

SEQ ID NO: 781 - protein, 7 aa, Homo sapiens
CLGIPTR

SEQ ID NO: 782 - protein, 10 aa, Homo sapiens
CDLELETNGR

SEQ ID NO: 783 - protein, 13 aa, Homo sapiens
EYLPIGGLAEFCK

SEQ ID NO: 784 - protein, 7 aa, Homo sapiens
IAGLCNR

SEQ ID NO: 785 - protein, 9 aa, Homo sapiens
LIIVEGCQR

SEQ ID NO: 786 - protein, 8 aa, Homo sapiens
GLGDCLVK

SEQ ID NO: 787 - protein, 9 aa, Homo sapiens
YLAICHPFK

SEQ ID NO: 788 - protein, 6 aa, Homo sapiens
FENLCK

SEQ ID NO: 789 - protein, 7 aa, Homo sapiens
YIQAACK

SEQ ID NO: 790 - protein, 5 aa, Homo sapiens
FICIR

SEQ ID NO: 791 - protein, 13 aa, Homo sapiens
HSSLAGCQIINYR

SEQ ID NO: 792 - protein, 6 aa, Homo sapiens
VEECQR

SEQ ID NO: 793 - protein, 9 aa, Homo sapiens
LQLEACETR

SEQ ID NO: 794 - protein, 6 aa, Homo sapiens
LECLQR

SEQ ID NO: 795 - protein, 17 aa, Homo sapiens
FLEGTSCIAGVFVDATK

SEQ ID NO: 796 - protein, 15 aa, Homo sapiens
CITDPQTGLCLLPLK

SEQ ID NO: 797 - protein, 7 aa, Homo sapiens
LCFEGLR

SEQ ID NO: 798 - protein, 18 aa, Homo sapiens
TLLQGSGCLAGIYLEDTK

SEQ ID NO: 799 - protein, 9 aa, Homo sapiens
VPLDVACAR

SEQ ID NO: 800 - protein, 10 aa, Homo sapiens
CVEDPETGLR

SEQ ID NO: 801 - protein, 12 aa, Homo sapiens
AYLDATCVEWLR

SEQ ID NO: 802 - protein, 12 aa, Homo sapiens
AYLEGTCVEWLR

SEQ ID NO: 803 - protein, 12 aa, Homo sapiens
TYLEGTCVEWLR

SEQ ID NO: 804 - protein, 8 aa, Homo sapiens
ELYENFCK

SEQ ID NO: 805 - protein, 8 aa, Homo sapiens
CGEMLHIR

SEQ ID NO: 806 - protein, 8 aa, Homo sapiens
GTAVAICR

SEQ ID NO: 807 - protein, 15 aa, Homo sapiens
VGEATETALTCLVEK

SEQ ID NO: 808 - protein, 6 aa, Homo sapiens
FACFER

SEQ ID NO: 809 - protein, 9 aa, Homo sapiens
CSSILLHGK

SEQ ID NO: 810 - protein, 10 aa, Homo sapiens
ACVVHGSDLK

SEQ ID NO: 811 - protein, 8 aa, Homo sapiens
ECVQPATK

SEQ ID NO: 812 - protein, 9 aa, Homo sapiens
ANACNSVIK

SEQ ID NO: 813 - protein, 7 aa, Homo sapiens
DACLNAR

SEQ ID NO: 814 - protein, 12 aa, Homo sapiens
DACVISSDFHER

SEQ ID NO: 815 - protein, 6 aa, Homo sapiens
LIICVK

SEQ ID NO: 816 - protein, 12 aa, Homo sapiens
MAFPCFDEPLFK

SEQ ID NO: 817 - protein, 15 aa, Homo sapiens
LSAPGCWAACTNFSR

SEQ ID NO: 818 - protein, 10 aa, Homo sapiens
ALSIGFETCR

SEQ ID NO: 819 - protein, 8 aa, Homo sapiens
TEAADLCK

SEQ ID NO: 820 - protein, 16 aa, Homo sapiens
HHPTTLAVGICSPASR

SEQ ID NO: 821 - protein, 13 aa, Homo sapiens
CHLDTTGTYTQYR

SEQ ID NO: 822 - protein, 13 aa, Homo sapiens
LCLISTFLEDGIR

SEQ ID NO: 823 - protein, 12 aa, Homo sapiens
FEHCNFNDVTTR

SEQ ID NO: 824 - protein, 12 aa, Homo sapiens
DSNNLCLHFNPR

SEQ ID NO: 825 - protein, 9 aa, Homo sapiens
ACLENLGLK

SEQ ID NO: 826 - protein, 15 aa, Homo sapiens
IATGHNIIDELPPCK

SEQ ID NO: 827 - protein, 7 aa, Homo sapiens
LISLICR

SEQ ID NO: 828 - protein, 12 aa, Homo sapiens
CEDLETQTQSEK

SEQ ID NO: 829 - protein, 9 aa, Homo sapiens
LLCGLLAER

SEQ ID NO: 830 - protein, 7 aa, Homo sapiens
LDVLCTK

SEQ ID NO: 831 - protein, 13 aa, Homo sapiens
TIVYLDGSSQSCR

SEQ ID NO: 832 - protein, 6 aa, Homo sapiens
EGCVEK

SEQ ID NO: 833 - protein, 7 aa, Homo sapiens
TICIAYR

SEQ ID NO: 834 - protein, 6 aa, Homo sapiens
VTLTCK

SEQ ID NO: 835 - protein, 11 aa, Homo sapiens
NILVNSNLVCK

SEQ ID NO: 836 - protein, 7 aa, Homo sapiens
CGQYIQK

SEQ ID NO: 837 - protein, 15 aa, Homo sapiens
DSFSDPYAHICFLHR

SEQ ID NO: 838 - protein, 7 aa, Homo sapiens
FPSVCEK

SEQ ID NO: 839 - protein, 20 aa, Homo sapiens
HSATTVFGANTPIVSCNFDR

SEQ ID NO: 840 - protein, 9 aa, Homo sapiens
KVCTNIIEK

SEQ ID NO: 841 - protein, 6 aa, Homo sapiens
ICFLHR

SEQ ID NO: 842 - protein, 9 aa, Homo sapiens
VHVCGQTHR

SEQ ID NO: 843 - protein, 9 aa, Homo sapiens
ADCLMGEFK

SEQ ID NO: 844 - protein, 13 aa, Homo sapiens
ELPDSVPQECTVR

SEQ ID NO: 845 - protein, 11 aa, Homo sapiens
KPVVGQCTIER

SEQ ID NO: 846 - protein, 12 aa, Homo sapiens
MYELSCYLPQEK

SEQ ID NO: 847 - protein, 10 aa, Homo sapiens
ASLLSAPPCR

SEQ ID NO: 848 - protein, 20 aa, Homo sapiens
NFQMASITSPSLVVECGGER

SEQ ID NO: 849 - protein, 20 aa, Homo sapiens
FGSHCGIPEEYCVSGVNTWR

SEQ ID NO: 850 - protein, 9 aa, Homo sapiens
GWWPCYAEK

SEQ ID NO: 851 - protein, 19 aa, Homo sapiens
LDLPNRPETSFLWFTNPCK

SEQ ID NO: 852 - protein, 9 aa, Homo sapiens
FHLCSVPTR

SEQ ID NO: 853 - protein, 20 aa, Homo sapiens
FCVSDTENNLGFALGPMFVK

SEQ ID NO: 854 - protein, 7 aa, Homo sapiens
ANSEACR

SEQ ID NO: 855 - protein, 6 aa, Homo sapiens
AVMECR

SEQ ID NO: 856 - protein, 9 aa, Homo sapiens
LHIVQVVCK

SEQ ID NO: 857 - protein, 11 aa, Homo sapiens
SFLIEIQCISR

SEQ ID NO: 858 - protein, 12 aa, Homo sapiens
SAFPCFDEPAFK

SEQ ID NO: 859 - protein, 7 aa, Homo sapiens
VTCEPQK

SEQ ID NO: 860 - protein, 17 aa, Homo sapiens
AVLVTGGDCGLGHALCK

SEQ ID NO: 861 - protein, 6 aa, Homo sapiens
LCFLDK

SEQ ID NO: 862 - protein, 13 aa, Homo sapiens
GLAPAEISAVCEK

SEQ ID NO: 863 - protein, 10 aa, Homo sapiens
ALQAQEIECR

SEQ ID NO: 864 - protein, 10 aa, Homo sapiens
IHAPWNVLCR

SEQ ID NO: 865 - protein, 7 aa, Homo sapiens
CLAPSPK

SEQ ID NO: 866 - protein, 6 aa, Homo sapiens
IFCTAK

SEQ ID NO: 867 - protein, 6 aa, Homo sapiens
SQQLCK

SEQ ID NO: 868 - protein, 6 aa, Homo sapiens
YVCLVR

SEQ ID NO: 869 - protein, 7 aa, Homo sapiens
VYCLKMR

SEQ ID NO: 870 - protein, 6 aa, Homo sapiens
YIDLCR

SEQ ID NO: 871 - protein, 7 aa, Homo sapiens
AICITYK

SEQ ID NO: 872 - protein, 9 aa, Homo sapiens
YIAICHPFK

SEQ ID NO: 873 - protein, 9 aa, Homo sapiens
CSSILIHGK
